(19) United States
(12) Patent Application Publication
(10) Pub. No.: US 2005/0287544 A1
(43) Pub. Date: Dec. 29, 2005

(54) Gene expression profiling of colon cancer with DNA arrays

(76) Inventors: Francois Bertucci, Marseille (FR); Remi Houlgatte, Marseille (FR); Daniel Birnbaum, Marseille (FR); Stephane Debono, Marseille (FR)

Correspondence Address: IP GROUP OF DLA PIPER RUDNICK GRAY CARY US LLP, 1650 MARKET ST, SUITE 4900, PHILADELPHIA, PA, 19103, US

(21) Appl. No.: 11/000,688

(22) Filed: Dec. 1, 2004

Related U.S. Application Data
(60) Provisional application No. 60/525,987, filed on Dec. 1, 2003.

(51) Int. Cl. C12Q 1/68

(52) U.S. Cl. 435/6

(57) ABSTRACT

Differential gene expression associated with histopathologic features of colorectal disease can be performed with nucleic acid arrays. Such arrays can comprise a pool of polynucleotide sequences from colon tissues, and the detection of the overexpression or underexpression of polynucleotide sequences (or subsequences or complements thereof) from this pool can provide information relating to the detection, diagnosis, stage, classification, monitoring, prediction, prevention or treatment of colorectal disease.

[0001] This Application claims the benefit of co-pending U.S. provisional patent application Ser. No. 60/525,987, filed Dec. 1, 2003, the entire disclosure of which is herein incorporated by reference.

### SEQUENCE LISTING

[0002] The instant application contains a “lengthy” Sequence Listing which has been submitted via CD-R in lieu of a printed paper copy, and is hereby incorporated by reference in its entirety. Said CD-R, recorded on May 5, 2005, are labeled CRF, “Copy 1” and “Copy 2”, respectively, and each contains only one identical 3.63 Mb file NAMED 1423R03.APP.

### FIELD OF THE INVENTION

[0003] The present invention relates to polynucleotide analysis and, in particular, to polynucleotide expression profiling of colorectal carcinomas using arrays of polynucleotides.

### BACKGROUND

[0004] Colorectal carcinoma (CRC) is a frequent and deadly disease. Different groups of tumors have been defined according to aggressiveness, anatomical localization and putative genetic instability based on conventional histopathological and immunohistopathological analysis. However, these aforementioned diagnostic tools are not sufficient to accurately diagnose and predict survival. Gene expression microarrays improve these classifications and bring new insights on the underlying molecular mechanisms involved throughout colorectal tumorigenic progression.

[0005] Despite global scientific efforts to effectively treat colon cancer, little progress has been made during the last decade and colorectal cancer (CRC) remains one of the most frequent and deadly neoplasias in western countries. Current prognostic models based on histoclinical parameters inadequately describe the heterogeneity of CRC, and are not sufficient to predict prognosis and guide clinical treatment in the individual patients. Tumors with different genetic alteration with similar clinical presentation follow different evolutions. One goal of molecular analysis is to identify, among complex networks of genes involved in tumorigenic progression, markers that could differentiate subgroups of tumors with prognosis, hence providing physicians with a clinically useful diagnostic tool to treat individual patients based on molecular gene sets as previously described.

[0006] Previous studies have been largely focused on individual candidate genes of disease, contrasting with the molecular complexity of cancer. The multi-step progression of CRC is accompanied by a number of genetic alterations [KRAS, APC, P53 and mismatch repair (MMR) genes, WNT and TGF-alpha pathways] that accumulate and interact in heterogenous complex ways to exert their tumor promoting effects (Vogelstein, 1988; Fearon, 1990). Despite the large number of published studies, the clinical utility of these disparate observations and reports remain limited for CRC patients. For example, little is known about molecular alterations associated with the prognostic heterogeneity of disease or the microsatellite instability (MSI) phenotype, and no single molecular marker has been validated to accurately predict prognososis in clinical practice. New models based on a precise molecular understanding of disease are required to improve screening, diagnosis,treatment, and ultimately survival of patients.

[0007] DNA microarray technology allows the measure of the mRNA expression level of thousands of genes simultaneously in a single assay, thus providing a molecular definition of a sample adapted to address the combinatory and complex nature of cancers (Bertucci, 2001; Ramaswamy, 2002; Mohr, 2002). Gene expression profiling may reveal biologically and/or clinically relevant subgroups of tumors (Alizadeh, 2000; Garber, 2001; Kihara, 2001; Beer, 2002; Bertucci, 2002; Devilard, 2002; Singh, 2002) and significantly improve current mechanistic understanding of oncogenesis.

[0008] Gene expression profiling-based studies of CRC have so far compared normal to tumor tissue samples, or described the molecular heterogeniety in different stages of colorectal disease (Alon, 1999; Notterman, 2001; Lin, 2002; Backert, 1999; Zou, 2002; Agrawal, 2002; Kitahara, 2001; Williams, 2003; Tureci, 2003; Birkenkamp-Demtroder, 2002; Frederiksen, 2003), but none have directly addressed the issue of prognosis or MSI phenotype.

### SUMMARY OF THE INVENTION

[0009] DNA microarrays may be utilized to elucidate discrete gene sets to improve the prognostic classification of CRC, identify novel potential therapeutic targets of carcinogenesis, describe new diagnostic and/or prognostic markers, and guide physician decisions on appropriate patient care.

[0010] The invention thus provides a method for analyzing differential gene expression associated with histopathologic features of colorectal disease, comprising the detection of the overexpression or underexpression of a pool of polynucleotide sequences in colon tissues, said pool comprising all or part of the polynucleotide sequences, subsequences or complements thereof, selected from each of predefined polynucleotide sequence sets I through 644 set forth in Table 1.

[0011] The invention further provides a method or prognosis or diagnosis of colon cancer, or for monitoring the treatment of a subject with a colon cancer. This method comprises the steps of 1) obtaining colon tissue nucleic acids from a patient; and 2) detecting the overexpression or underexpression of a pool of polynucleotide sequences in colon tissues. The pool of polynuclestide sequences comprises all or part of the polynucleotide sequences, subsequences or complements thereof, selected from each of predefined polynucleotide sequnce sets 1 through 644, as set forth in Table 1.

[0012] The invention further provides a polynucleotide library, comprising a pool of polynucleotide sequences either overexpressed or underexpressed in colon tissue, said pool corresponding to all or part of the polynucleotide sequences of SEQ ID Nos. 1 through 1596.

[0013] The invention still further provides a method of detecting differential gene expression, comprises 1) obtaining a polynucleotide sample from a subject; 2) reacting said polynucleotide sample obtained in step (1) with a polynucleotide library of the invention; and 3) detecting the reaction product of step (2).

[0014] The invention still further provides a method of assigning a therapeutic regimen to subject with histopathological features of colorectal disease, comprising 1) classifying the subject as having a “poor prognosis” or a “good prognosis” on the basis of the method of differential gene expression analysis according to the invention, and 2) assigning the subject a therapeutic regimen. The therapeutic regimen will either (i) comprise no adjuvant chemotherapy if the subject is lymph node negative and is classified as having a good prognosis, or (ii) comprise chemotherapy if said patient has any other combination of lymph node status and expression profile.

### BRIEF DESCRIPTION OF THE FIGURES

[0015] FIGS. 1A-1C show global gene expression profiles in colorectal cancer and non-cancerous samples.

[0016] FIGS. 2A-2B show hierarchical classifications of tissue samples using genes which discriminate between normal and cancer samples.

[0017] FIGS. 3A-3C show hierarchical classifications of CRC tissue samples using genes that discriminate metastatic from non-metastatic samples, correlated with survival.

[0018] FIGS. 4A-4C show hierarchical classifications of CRC tissue samples using discriminator genes selected by supervised analyses based on lymph node status, MSI phenotype and location of tumors.

[0019] FIGS. 5A-5C show the analysis of NM23 protein expression in colorectal tissue samples using tissue microarrays.

### DETAILED DESCRIPTION OF THE INVENTION

[0020] The present invention relates to DNA array, technology which can be used to analyse the expression of numerous (e.g., ˜8,000) genes in cancerous and non-cancerous colon tissue or cell samples. Unsupervised hierarchical clustering can be used to identify putative gene expression patterns that are precisely correlated to subgroups of tumors; and these sub-groups are notably correlated to patient prognosis, disease aggressiveness, and survival. Supervised analysis can be used to identify several genes differentially expressed between normal and cancer samples, and delineated subgroups of colon cancer can be defined by histoclinical parameters, including clinical outcome (i.e., 5-year survival of 100% in a group and 40% in the other group, p<0.005), lymph node invasion, tumors from the right or left colon, and MSI phenotype. Discriminator genes are associated with various cellular processes. The most significant discriminatory genes and/or potential markers identified by the present invention were further validated at the protein level using immunohistochemistry (IHC) on sections of tissue microarrays (TMA) on 190 tumor and normal samples (see Examples below).

[0021] The invention thus provides a method for analyzing differential gene expression associated with histopathologic features of colorectal disease, e.g., colon tumors, in particular colon cancer. The method of the invention comprises the detection of the overexpression or underexpression of a pool of polynucleotide sequences in colon tissues. The pool of polynucleotide sequences corresponds to all or part of the polynucleotide sequences, subsequences or complements thereof, selected from each of predefined polynucleotide sequences sets set forth in Table 1 below.

TABLE 1

| Gene | Set | | | | | |
|---|---|---|---|---|---|---|
| symbol | No. | Image | Name | Seq3′ | Seq5′ | Ref |
| CAPG | 1 | 1012666 | capping protein (actin filament), | SEQ ID No: 1 | | SEQ ID No: 2 |
| | | | gelsolin-like | | | |
| DEK | 2 | 1016390 | dek oncogene (dna binding) | SEQ ID No: 3 | | SEQ ID No: 4 |
| DVL1 | 3 | 1030065 | dishevelled, dsh homolog 1 (drosophila) | SEQ ID No: 5 | | SEQ ID No: 6 |
| NOV | 4 | 1046837 | nephroblastoma overexpressed gene | SEQ ID No: 7 | | SEQ ID No: 8 |
| CD79A | 5 | 1056782 | cd79a antigen (immunoglobulin- | SEQ ID No: 9 | | SEQ ID No: 10 |
| | | | associated alpha) | | | |
| MGC27076 | 6 | 108249 | hypothetical protein mgc27076 | SEQ ID No: 11 | SEQ ID No: 12 | SEQ ID No: 13 |
| | 7 | 108274 | | SEQ ID No: 14 | | |
| | 8 | 108292 | | SEQ ID No: 15 | | |
| C1ORF28 | 9 | 108305 | chromosome 1 open reading frame 28 | SEQ ID No: 16 | SEQ ID No: 17 | SEQ ID No: 18 |
| MAP2K2 | 10 | 108370 | mitogen-activated protein kinase kinase 2 | SEQ ID No: 19 | SEQ ID No: 20 | SEQ ID No: 21 |
| LOC220115 | 11 | 108374 | hypothetical protein loc220115 | | SEQ ID No: 22 | |
| | 12 | 108399 | | SEQ ID No: 23 | | |
| HRB | 13 | 108490 | hiv-1 rev binding protein | SEQ ID No: 24 | | SEQ ID No: 25 |
| | 14 | 110385 | hypothetical gene supported by | SEQ ID No: 26 | SEQ ID No: 27 | |
| | | | ak026041 | | | |
| LOC92906 | 15 | 110486 | hypothetical protein bc008217 | SEQ ID No: 28 | SEQ ID No: 29 | SEQ ID No: 30 |
| SOX4 | 16 | 111461 | sry (sex determining region y)-box 4 | SEQ ID No: 31 | SEQ ID No: 32 | SEQ ID No: 33 |
| GSTA2 | 17 | 113932 | glutathione s-transferase a2 | SEQ ID No: 34 | SEQ ID No: 35 | SEQ ID No: 36 |
| MLLT3 | 18 | 1144752 | myeloid/lymphoid or mixed-lineage | SEQ ID No: 37 | | SEQ ID No: 38 |
| | | | leukemia (trithorax homolog, | | | |
| | | | drosophila); translocated to, 3 | | | |
| TCF3 | 19 | 114639 | transcription factor 3 (e2a | SEQ ID No: 39 | SEQ ID No: 40 | SEQ ID No: 41 |
| | | | immunoglobulin enhancer binding | | | |
| | | | factors e12/e47) | | | |
| PMS2 | 20 | 116906 | pms2 postmeiotic segregation increased | SEQ ID No: 42 | SEQ ID No: 43 | SEQ ID No: 44 |
| | | | 2 (s. cerevisiae) | | | |
| LPP | 21 | 117240 | lim domain containing preferred | SEQ ID No: 45 | SEQ ID No: 46 | SEQ ID No: 47 |
| | | | translocation partner in lipoma | | | |
| PTPRC | 22 | 117755 | protein tyrosine phosphatase, receptor | SEQ ID No: 48 | | SEQ ID No: 49 |
| | | | type, c | | | |
| | 23 | 117811 | similar to [human ig rearranged gamma | SEQ ID No: 50 | SEQ ID No: 51 | |
| | | | chain mrna, v-j-c region and complete | | | |
| | | | cds.], gene product | | | |
| C6ORF53 | 24 | 1184178 | chromosome 6 open reading frame 53 | SEQ ID No: 52 | | SEQ ID No: 53 |
| PDPK1 | 25 | 1185650 | 3-phosphoinositide dependent protein | SEQ ID No: 54 | | SEQ ID No: 55 |
| | | | kinase-1 | | | |
| | 26 | 118634 | similar to [human ig rearranged gamma | SEQ ID No: 56 | SEQ ID No: 57 | |
| | | | chain mrna, v-j-c region and complete | | | |
| | | | cds.], gene product | | | |
| KCNJ15 | 27 | 119530 | potassium inwardly-rectifying channel, | SEQ ID No: 58 | SEQ ID No: 59 | SEQ ID No: 60 |
| | | | subfamily j, member 15 | | | |
| | 28 | 119772 | loc284066 | SEQ IDNo: 61 | | |
| USP9X | 29 | 120009 | ubiquitin specific protease 9, x | SEQ ID No: 62 | SEQ ID No: 63 | SEQ ID No: 64 |
| | | | chromosome (fat facets-like drosophila) | | | |
| HELZ | 30 | 120572 | helicase with zinc finger domain | SEQ ID No: 65 | | SEQ ID No: 66 |
| ADD1 | 31 | 120783 | adducin 1 (alpha) | SEQ ID No: 67 | | SEQ ID No: 68 |
| ATP5L | 32 | 121076 | atp synthase, h+ transporting, | SEQ ID No: 69 | | SEQ ID No: 70 |
| | | | mitochondrial f0 complex, subunit g | | | |
| IFNAR1 | 33 | 121265 | interferon (alpha, beta and omega) | SEQ ID No: 71 | SEQ ID No: 72 | SEQ ID No: 73 |
| | | | receptor 1 | | | |
| ELAVL1 | 34 | 121366 | elav (embryonic lethal, abnormal | SEQ ID No: 74 | | SEQ ID No: 75 |
| | | | vision, drosophila)-like 1 (hu antigen r) | | | |
| | 35 | 122004 | loc143724 | SEQ ID No: 76 | | |
| DSG1 | 36 | 122743 | desmoglein 1 | SEQ ID No: 77 | SEQ ID No: 78 | SEQ ID No: 79 |
| OLFM1 | 37 | 122756 | olfactomedin 1 | SEQ ID No: 80 | | SEQ ID No: 81 |
| C3 | 38 | 123379 | complement component 3 | SEQ ID No: 82 | | SEQ ID No: 83 |
| C4BPA | 39 | 123664 | complement component 4 binding | SEQ ID No: 84 | SEQ ID No: 85 | SEQ ID No: 86 |
| | | | protein, alpha | | | |
| DMPK | 40 | 123916 | dystrophia myotonica-protein kinase | SEQ ID No: 87 | SEQ ID No: 88 | SEQ ID No: 89 |
| RPL6 | 41 | 123948 | ribosomal protein 16 | SEQ ID No: 90 | SEQ ID No: 91 | SEQ ID No: 92 |
| HLA-DQB1 | 42 | 123953 | major histocompatibility complex, class | SEQ ID No: 93 | SEQ ID No: 94 | SEQ ID No: 95 |
| | | | ii, dq beta 1 | | | |
| CENPF | 43 | 124345 | centromere protein f, 350/400 ka | SEQ ID No: 96 | SEQ ID No: 97 | SEQ ID No: 98 |
| | | | (mitosin) | | | |
| CSF1 | 44 | 124554 | colony stimulating factor 1 | SEQ ID No: 99 | | SEQ ID No: 100 |
| | | | (macrophage) | | | |
| NDST3 | 45 | 125806 | n-deacetylase/n-sulfotransferase | SEQ ID No: 101 | SEQ ID No: 102 | SEQ ID No: 103 |
| | | | (heparan glucosaminyl) 3 | | | |
| SPI1 | 46 | 127394 | spleen focus forming virus (sffv) | SEQ ID No: 104 | SEQ ID No: 105 | SEQ ID No: 106 |
| | | | proviral integration oncogene spi1 | | | |
| ATP5C1 | 47 | 127950 | atp synthase, h+ transporting, | SEQ ID No: 107 | SEQ ID No: 108 | SEQ ID No: 109 |
| | | | mitochondrial f1 complex, gamma | | | |
| | | | polypeptide 1 | | | |
| TNFSF10 | 48 | 128413 | tumor necrosis factor (ligand) | SEQ ID No: 110 | SEQ ID No: 111 | SEQ ID No: 112 |
| | | | superfamily, member 10 | | | |
| ASBABP2 | 49 | 129112 | aspecific bcl2 are-binding protein 2 | SEQ ID No: 113 | | SEQ ID No: 114 |
| COX7A2L | 50 | 129146 | cytochrome c oxidase subunit viia | SEQ ID No: 115 | SEQ ID No: 116 | SEQ ID No: 117 |
| | | | polypeptide 2 like | | | |
| XTP5 | 51 | 129227 | minor histocompatibility antigen ha-8 | SEQ ID No: 118 | SEQ ID No: 119 | SEQ ID No: 120 |
| GATA3 | 52 | 129757 | gata binding protein 3 | SEQ ID No: 121 | | SEQ ID No: 122 |
| STK6 | 53 | 129865 | serine/threonine kinase 6 | SEQ ID No: 123 | | SEQ ID No: 124 |
| FLJ14297 | 54 | 130173 | hypothetical protein flj14297 | SEQ ID No: 125 | SEQ ID No: 126 | SEQ ID No: 127 |
| HEYL | 55 | 132307 | hairy/enhancer-of-split related with | SEQ ID No: 128 | SEQ ID No: 129 | SEQ ID No: 130 |
| | | | yrpw motif-like | | | |
| CD2 | 56 | 1326652 | cd2 antigen (p50), sheep red blood cell | SEQ ID No: 131 | | SEQ ID No: 132 |
| | | | receptor | | | |
| GRF2 | 57 | 133334 | guanine nucleotide-releasing factor 2 | SEQ ID No: 133 | | SEQ ID No: 134 |
| | | | (specific for crk proto-oncogene) | | | |
| ITGAL | 58 | 1338831 | integrin, alpha 1 (antigen cd11a (p180), | SEQ ID No: 135 | | SEQ ID No: 136 |
| | | | lymphocyte function-associated antigen | | | |
| | | | 1; alpha polypeptide) | | | |
| SPIB | 59 | 1350545 | spi-b transcription factor (spi-1/pu.1 | SEQ ID No: 137 | | SEQ ID No: 138 |
| | | | related) | | | |
| S100P | 60 | 135221 | s100 calcium binding protein p | SEQ ID No: 139 | SEQ ID No: 140 | SEQ ID No: 141 |
| PVRL3 | 61 | 135302 | poliovirus receptor-related 3 | SEQ ID No: 142 | SEQ ID No: 143 | SEQ ID No: 144 |
| | 62 | 136361 | | SEQ ID No: 145 | SEQ ID No: 146 | |
| COX6A1 | 63 | 139069 | cytochrome c oxidase subunit via | SEQ ID No: 147 | SEQ ID No: 148 | SEQ ID No: 149 |
| | | | polypeptide 1 | | | |
| IL2RB | 64 | 139073 | interleukin 2 receptor, beta | SEQ ID No: 150 | SEQ ID No: 151 | SEQ ID No: 152 |
| CDK2 | 65 | 1391584 | cyclin-dependent kinase 2 | SEQ ID No: 153 | | SEQ ID No: 154 |
| GPR1 | 66 | 139304 | g protein-coupled receptor 1 | SEQ ID No: 155 | SEQ ID No: 156 | SEQ ID No: 157 |
| PSG6 | 67 | 139392 | pregnancy specific beta-1-glycoprotein 6 | SEQ ID No: 158 | SEQ ID No: 159 | SEQ ID No: 160 |
| EPS15 | 68 | 139789 | epidermal growth factor receptor | SEQ ID No: 161 | SEQ ID No: 162 | SEQ ID No: 163 |
| | | | pathway substrate 15 | | | |
| APRT | 69 | 141998 | adenine phosphoribosyltransferase | SEQ ID No: 164 | SEQ ID No: 165 | SEQ ID No: 166 |
| TGFB1I1 | 70 | 1423050 | transforming growth factor beta 1 | SEQ ID No: 167 | | SEQ ID No: 168 |
| | | | induced transcript 1 | | | |
| FKBP2 | 71 | 143519 | fk506 binding protein 2, 13 kda | SEQ ID No: 169 | SEQ ID No: 170 | SEQ ID No: 171 |
| | 72 | 144853 | | SEQ ID No: 172 | | |
| BLVRA | 73 | 145269 | biliverdin reductase a | SEQ ID No: 173 | SEQ ID No: 174 | SEQ ID No: 175 |
| SLC30A5 | 74 | 145286 | solute carrier family 30 (zinc | SEQ ID No: 176 | SEQ ID No: 177 | SEQ ID No: 178 |
| | | | transporter), member 5 | | | |
| AZGP1 | 75 | 1456160 | alpha-2-glycoprotein 1, zinc | SEQ ID No: 179 | | SEQ ID No: 180 |
| | 76 | 1456315 | homo sapiens cdna flj30452 fis, clone | SEQ ID No: 181 | | |
| | | | brace2009293. | | | |
| KLRD1 | 77 | 145696 | killer cell lectin-like receptor subfamily | | SEQ ID No: 182 | SEQ ID No: 183 |
| | | | d, member 1 | | | |
| FOLR2 | 78 | 146494 | folate receptor 2 (fetal) | SEQ ID No: 184 | SEQ ID No: 185 | SEQ ID No: 186 |
| | 79 | 146922 | | SEQ ID No: 187 | SEQ ID No: 188 | |
| PTGS2 | 80 | 147050 | prostaglandin-endoperoxide synthase 2 | SEQ ID No: 189 | SEQ ID No: 190 | SEQ ID No: 191 |
| | | | (prostaglandin g/h synthase and | | | |
| | | | cyclooxygenase) | | | |
| PECAM1 | 81 | 147341 | platelet/endothelial cell adhesion | SEQ ID No: 192 | | SEQ ID No: 193 |
| | | | molecule (cd31 antigen) | | | |
| PSEN1 | 82 | 147495 | presenilin 1 (alzheimer disease 3) | SEQ ID No: 194 | SEQ ID No: 195 | SEQ ID No: 196 |
| | 83 | 1493187 | homo sapiens, clone image: 4831215, | SEQ ID No: 197 | | |
| | | | mrna | | | |
| GATA2 | 84 | 149809 | gata binding protein 2 | SEQ ID No: 198 | SEQ ID No: 199 | SEQ ID No: 200 |
| CHST13 | 85 | 1500894 | carbohydrate (chondroitin 4) | SEQ ID No: 201 | | SEQ ID No: 202 |
| | | | sulfotransferase 13 | | | |
| IGF1R | 86 | 150361 | insulin-like growth factor 1 receptor | SEQ ID No: 203 | SEQ ID No: 204 | SEQ ID No: 205 |
| SOCS2 | 87 | 150644 | suppressor of cytokine signaling 2 | SEQ ID No: 206 | SEQ ID No: 207 | SEQ ID No: 208 |
| INSR | 88 | 151149 | insulin receptor | | SEQ ID No: 209 | SEQ ID No: 210 |
| TFDP1 | 89 | 151495 | transcription factor dp-1 | SEQ ID No: 211 | SEQ ID No: 212 | SEQ ID No: 213 |
| IL10RA | 90 | 151740 | interleukin 10 receptor, alpha | SEQ ID No: 214 | SEQ ID No: 215 | SEQ ID No: 216 |
| LYK5 | 91 | 152467 | protein kinase lyk5 | SEQ ID No: 217 | SEQ ID No: 218 | SEQ ID No: 219 |
| MYBL1 | 92 | 1526789 | v-myb myeloblastosis viral oncogene | SEQ ID No: 220 | | |
| | | | homolog (avian)-like 1 | | | |
| LIF | 93 | 153025 | leukemia inhibitory factor (cholinergic | SEQ ID No: 221 | SEQ ID No: 222 | SEQ ID No: 223 |
| | | | differentiation factor) | | | |
| EIF4G3 | 94 | 153141 | eukaryotic translation initiation factor 4 | SEQ ID No: 224 | SEQ ID No: 225 | SEQ ID No: 226 |
| | | | gamma, 3 | | | |
| TGFB1I1 | 95 | 153461 | transforming growth factor beta 1 | SEQ ID No: 227 | SEQ ID No: 228 | SEQ ID No: 168 |
| | | | induced transcript 1 | | | |
| TJP3 | 96 | 153474 | tight junction protein 3 (zona occludens | SEQ ID No: 229 | SEQ ID No: 230 | SEQ ID No: 231 |
| | | | 3) | | | |
| STC1 | 97 | 153589 | stanniocalcin 1 | SEQ ID No: 232 | SEQ ID No: 233 | SEQ ID No: 234 |
| DES | 98 | 153854 | desmin | SEQ ID No: 235 | SEQ ID No: 236 | SEQ ID No: 237 |
| FCGBP | 99 | 154172 | fc fragment of igg binding protein | SEQ ID No: 238 | | SEQ ID No: 239 |
| PMSCL2 | 100 | 154335 | polymyositis/scleroderma autoantigen | SEQ ID No: 240 | SEQ ID No: 241 | SEQ ID No: 242 |
| | | | 2, 100 kda | | | |
| PLCD1 | 101 | 154600 | phospholipase c, delta 1 | SEQ ID No: 243 | SEQ ID No: 244 | SEQ ID No: 245 |
| CRIP1 | 102 | 155219 | cysteine-rich protein 1 (intestinal) | SEQ ID No: 246 | | SEQ ID No: 247 |
| BCKDK | 103 | 155774 | branched chain alpha-ketoacid | SEQ ID No: 248 | SEQ ID No: 249 | SEQ ID No: 250 |
| | | | dehydrogenase kinase | | | |
| TCF3 | 104 | 156505 | transcription factor 3 (e2a | SEQ ID No: 251 | | SEQ ID No: 41 |
| | | | immunoglobulin enhancer binding | | | |
| | | | factors e12/e47) | | | |
| ZNF463 | 105 | 156718 | zinc finger protein 463 | SEQ ID No: 252 | | SEQ ID No: 253 |
| MCP | 106 | 158233 | membrane cofactor protein (cd46, | SEQ ID No: 254 | SEQ ID No: 255 | SEQ ID No: 256 |
| | | | trophoblast-lymphocyte cross-reactive | | | |
| | | | antigen) | | | |
| LTBP4 | 107 | 158239 | latent transforming growth factor beta | SEQ ID No: 257 | SEQ ID No: 258 | SEQ ID No: 259 |
| | | | binding protein 4 | | | |
| MEIS1 | 108 | 1591384 | meis1, myeloid ecotropic viral | SEQ ID No: 260 | | SEQ ID No: 261 |
| | | | integration site 1 homolog (mouse) | | | |
| ACE | 109 | 159885 | angiotensin i converting enzyme | SEQ ID No: 262 | | SEQ ID No: 263 |
| | | | (peptidyl-dipeptidase a) 1 | | | |
| CD3E | 110 | 159903 | cd3e antigen, epsilon polypeptide (tit3 | SEQ ID No: 264 | | SEQ ID No: 265 |
| | | | complex) | | | |
| MGC39325 | 111 | 165818 | hypothetical protein mgc39325 | SEQ ID No: 266 | SEQ ID No: 267 | SEQ ID No: 268 |
| PRKACA | 112 | 166052 | protein kinase, camp-dependent, | | SEQ ID No: 269 | SEQ ID No: 270 |
| | | | catalytic, alpha | | | |
| SERPINB5 | 113 | 1662274 | serine (or cysteine) proteinase inhibitor, | SEQ ID No: 271 | | SEQ ID No: 272 |
| | | | clade b (ovalbumin), member 5 | | | |
| HSF4 | 114 | 1667886 | heat shock transcription factor 4 | SEQ ID No: 273 | | SEQ ID No: 274 |
| DOK2 | 115 | 1671188 | docking protein 2, 56 kda | SEQ ID No: 275 | | SEQ ID No: 276 |
| EEF1A1 | 116 | 1683100 | eukaryotic translation elongation factor | SEQ ID No: 277 | | SEQ ID No: 278 |
| | | | 1 alpha 1 | | | |
| S100A12 | 117 | 1705397 | s100 calcium binding protein a12 | SEQ ID No: 279 | | SEQ ID No: 280 |
| | | | (calgranulin c) | | | |
| CAMK2B | 118 | 172444 | calcium/calmodulin-dependent protein | SEQ ID No: 281 | SEQ ID No: 282 | SEQ ID No: 283 |
| | | | kinase (cam kinase) ii beta | | | |
| PLCG2 | 119 | 1731982 | phospholipase c, gamma 2 | SEQ ID No: 284 | | SEQ ID No: 285 |
| | | | (phosphatidylinositol-specific) | | | |
| NME1 | 120 | 174388 | non-metastatic cells 1, protein (nm23a) | SEQ ID No: 286 | SEQ ID No: 287 | SEQ ID No: 288 |
| | | | expressed in | | | |
| PTGDS | 121 | 178305 | prostaglandin d2 synthase 21 kda (brain) | SEQ ID No: 289 | SEQ ID No: 290 | SEQ ID No: 291 |
| PP | 122 | 179232 | pyrophosphatase (inorganic) | SEQ ID No: 292 | | SEQ ID No: 293 |
| PPP2R2C | 123 | 179264 | protein phosphatase 2 (formerly 2a), | SEQ ID No: 294 | | |
| | | | regulatory subunit b (pr 52), gamma | | | |
| | | | isoform | | | |
| | 124 | 179776 | | SEQ ID No: 295 | | |
| | 125 | 181827 | | SEQ ID No: 296 | | |
| TP53 | 126 | 1847162 | tumor protein p53 (li-fraumeni | SEQ ID No: 297 | | SEQ ID No: 298 |
| | | | syndrome) | | | |
| DARS | 127 | 186331 | aspartyl-trna synthetase | SEQ ID No: 299 | SEQ ID No: 300 | SEQ ID No: 301 |
| EGF | 128 | 1869652 | epidermal growth factor (beta- | SEQ ID No: 302 | | SEQ ID No: 303 |
| | | | urogastrone) | | | |
| RPL29P2 | 129 | 190103 | ribosomal protein 129 pseudogene 2 | SEQ ID No: 304 | SEQ ID No: 305 | |
| EEF1B2 | 130 | 1902297 | eukaryotic translation elongation factor | SEQ ID No: 306 | | SEQ ID No: 307 |
| | | | 1 beta 2 | | | |
| STK6 | 131 | 1912132 | serine/threonine kinase 6 | SEQ ID No: 308 | | SEQ ID No: 124 |
| TAL1 | 132 | 191548 | t-cell acute lymphocytic leukemia 1 | SEQ ID No: 309 | | |
| RPS15A | 133 | 191714 | ribosomal protein s15a | SEQ ID No: 310 | | SEQ ID No: 311 |
| RPS19 | 134 | 192242 | ribosomal protein s19 | SEQ ID No: 312 | | SEQ ID No: 313 |
| HRD1 | 135 | 192515 | hrd1 protein | SEQ ID No: 314 | | SEQ ID No: 315 |
| PTPN21 | 136 | 192581 | protein tyrosine phosphatase, non- | SEQ ID No: 316 | | SEQ ID No: 317 |
| | | | receptor type 21 | | | |
| NDUFA4 | 137 | 193672 | nadh dehydrogenase (ubiquinone) 1 | SEQ ID No: 318 | SEQ ID No: 319 | SEQ ID No: 320 |
| | | | alpha subcomplex, 4, 9 kda | | | |
| TSG101 | 138 | 194350 | tumor susceptibility gene 101 | SEQ ID No: 321 | SEQ ID No: 322 | SEQ ID No: 323 |
| SDHD | 139 | 195013 | succinate dehydrogenase complex, | SEQ ID No: 324 | SEQ ID No: 325 | SEQ ID No: 326 |
| | | | subunit d, integral membrane protein | | | |
| DAP3 | 140 | 195702 | death associated protein 3 | SEQ ID No: 327 | SEQ ID No: 328 | SEQ ID No: 329 |
| BTF3 | 141 | 195889 | basic transcription factor 3 | SEQ ID No: 330 | | SEQ ID No: 331 |
| BUB3 | 142 | 198903 | bub3 budding uninhibited by | SEQ ID No: 332 | SEQ ID No: 333 | SEQ ID No: 334 |
| | | | benzimidazoles 3 homolog (yeast) | | | |
| | 143 | 199837 | homo sapiens transcribed sequence with | SEQ ID No: 335 | | |
| | | | strong similarity to protein sp: p08865 | | | |
| | | | (h. sapiens) rsp4_human 40s ribosomal | | | |
| | | | protein sa (p40) (34/67 kda laminin | | | |
| | | | receptor) (colon carcinoma laminin- | | | |
| | | | binding protein) (nem/1chd4) | | | |
| OAS1 | 144 | 200521 | 2′,5′-oligoadenylate synthetase 1, | SEQ ID No: 336 | SEQ ID No: 337 | SEQ ID No: 338 |
| | | | 40/46 kda | | | |
| CD209L | 145 | 200714 | cd209 antigen-like | SEQ ID No: 339 | SEQ ID No: 340 | SEQ ID No: 341 |
| FGB | 146 | 201352 | fibrinogen, b beta polypeptide | SEQ ID No: 342 | | SEQ ID No: 343 |
| MYL1 | 147 | 201925 | myosin, light polypeptide 1, alkali; | SEQ ID No: 344 | SEQ ID No: 345 | SEQ ID No: 346 |
| | | | skeletal, fast | | | |
| PRPF4B | 148 | 202609 | prp4 pre-mrna processing factor 4 | SEQ ID No: 347 | SEQ ID No: 348 | SEQ ID No: 349 |
| | | | homolog b (yeast) | | | |
| ARGBP2 | 149 | 203264 | arg/abl-interacting protein argbp2 | SEQ ID No: 350 | SEQ ID No: 351 | SEQ ID No: 352 |
| RFC4 | 150 | 203275 | replication factor c (activator 1) 4, | SEQ ID No: 353 | SEQ ID No: 354 | SEQ ID No: 355 |
| | | | 37 kda | | | |
| CSF1R | 151 | 204653 | colony stimulating factor 1 receptor, | SEQ ID No: 356 | SEQ ID No: 357 | SEQ ID No: 358 |
| | | | formerly mcdonough feline sarcoma | | | |
| | | | viral (v-fms) oncogene homolog | | | |
| | 152 | 204740 | | SEQ ID No: 359 | | |
| | 153 | 2048801 | homo sapiens mrna full length insert | SEQ ID No: 360 | | |
| | | | cdna clone euroimage 1630957 | | | |
| TP53 | 154 | 205314 | tumor protein p53 (li-fraumeni | | SEQ ID No: 361 | SEQ ID No: 298 |
| | | | syndrome) | | | |
| LRP2 | 155 | 2055272 | low density lipoprotein-related protein 2 | SEQ ID No: 362 | | SEQ ID No: 363 |
| SP110 | 156 | 205612 | sp110 nuclear body protein | SEQ ID No: 364 | SEQ ID No: 365 | SEQ ID No: 366 |
| CCNF | 157 | 206323 | cyclin f | | SEQ ID No: 367 | SEQ ID No: 368 |
| CAPN12 | 158 | 206522 | calpain 12 | SEQ ID No: 369 | SEQ ID No: 370 | |
| GRB14 | 159 | 2067776 | growth factor receptor-bound protein 14 | SEQ ID No: 371 | | SEQ ID No: 372 |
| DDX24 | 160 | 207491 | dead (asp-glu-ala-asp) box polypeptide | SEQ ID No: 373 | SEQ ID No: 374 | SEQ ID No: 375 |
| | | | 24 | | | |
| | 161 | 208357 | | SEQ ID No: 376 | SEQ ID No: 377 | |
| HPN | 162 | 208413 | hepsin (transmembrane protease, serine | SEQ ID No: 378 | SEQ ID No: 379 | SEQ ID No: 380 |
| | | | 1) | | | |
| MGP | 163 | 209710 | matrix gla protein | SEQ ID No: 381 | | SEQ ID No: 382 |
| | 164 | 2106469 | similar to riken cdna 4933405110 | SEQ ID No: 383 | | |
| EPB41L4B | 165 | 210698 | erythrocyte membrane protein band 4.1 | SEQ ID No: 384 | SEQ ID No: 385 | SEQ ID No: 386 |
| | | | like 4b | | | |
| RPS4X | 166 | 211433 | ribosomal protein s4, x-linked | SEQ ID No: 387 | | SEQ ID No: 388 |
| IGF2 | 167 | 211445 | insulin-like growth factor 2 | SEQ ID No: 389 | | SEQ ID No: 390 |
| | | | (somatomedin a) | | | |
| UBA52 | 168 | 211920 | ubiquitin a-52 residue ribosomal protein | SEQ ID No: 391 | SEQ ID No: 392 | SEQ ID No: 393 |
| | | | fusion product 1 | | | |
| AKR1C3 | 169 | 211995 | aldo-keto reductase family 1, member | | SEQ ID No: 394 | SEQ ID No: 395 |
| | | | c3 (3-alpha hydroxysteroid | | | |
| | | | dehydrogenase, type ii) | | | |
| RARB | 170 | 212414 | retinoic acid receptor, beta | SEQ ID No: 396 | SEQ ID No: 397 | SEQ ID No: 398 |
| MGLL | 171 | 21626 | monoglyceride lipase | SEQ ID No: 399 | | SEQ ID No: 400 |
| CRK | 172 | 22295 | v-crk sarcoma virus ct10 oncogene | | SEQ ID No: 401 | SEQ ID No: 402 |
| | | | homolog (avian) | | | |
| LAMA3 | 173 | 2266576 | laminin, alpha 3 | SEQ ID No: 403 | | SEQ ID No: 404 |
| ZDHHC1 | 174 | 2272404 | zinc finger, dhhc domain containing 1 | SEQ ID No: 405 | | SEQ ID No: 406 |
| BCL2 | 175 | 232714 | b-cell cll/lymphoma 2 | SEQ ID No: 407 | | SEQ ID No: 408 |
| VPREB3 | 176 | 2349125 | pre-b lymphocyte gene 3 | SEQ ID No: 409 | | SEQ ID No: 410 |
| PFC | 177 | 235934 | properdin p factor, complement | SEQ ID No: 411 | SEQ ID No: 412 | SEQ ID No: 413 |
| BAK1 | 178 | 235938 | bcl2-antagonist/killer 1 | SEQ ID No: 414 | SEQ ID No: 415 | SEQ ID No: 416 |
| MGC13071 | 179 | 236008 | hypothetical protein mgc13071 | SEQ ID No: 417 | SEQ ID No: 418 | SEQ ID No: 419 |
| TP53 | 180 | 236338 | tumor protein p53 (li-fraumeni | SEQ ID No: 420 | SEQ ID No: 421 | SEQ ID No: 298 |
| | | | syndrome) | | | |
| CAPN2 | 181 | 23643 | calpain 2, (m/ii) large subunit | SEQ ID No: 422 | SEQ ID No: 423 | SEQ ID No: 424 |
| ARAF1 | 182 | 23692 | v-raf murine sarcoma 3611 viral | SEQ ID No: 425 | SEQ ID No: 426 | SEQ ID No: 427 |
| | | | oncogene homolog 1 | | | |
| QDPR | 183 | 23776 | quinoid dihydropteridine reductase | SEQ ID No: 428 | SEQ ID No: 429 | SEQ ID No: 430 |
| SLC12A2 | 184 | 238612 | solute carrier family 12 | SEQ ID No: 431 | SEQ ID No: 432 | SEQ ID No: 433 |
| | | | (sodium/potassium/chloride | | | |
| | | | transporters), member 2 | | | |
| MGC5395 | 185 | 238840 | hypothetical protein mgc5395 | SEQ ID No: 434 | SEQ ID No: 435 | SEQ ID No: 436 |
| GCSH | 186 | 239937 | glycine cleavage system protein h | | SEQ ID No: 437 | SEQ ID No: 438 |
| | | | (aminomethyl carrier) | | | |
| EPHB2 | 187 | 24067 | ephb2 | SEQ ID No: 439 | | SEQ ID No: 440 |
| | 188 | 240753 | | SEQ ID No: 441 | SEQ ID No: 442 | |
| TPP2 | 189 | 24085 | tripeptidyl peptidase ii | SEQ ID No: 443 | SEQ ID No: 444 | SEQ ID No: 445 |
| TPP2 | 190 | 241151 | tripeptidyl peptidase ii | SEQ ID No: 446 | SEQ ID No: 447 | SEQ ID No: 445 |
| IQGAP1 | 191 | 24125 | iq motif containing gtpase activating | SEQ ID No: 448 | SEQ ID No: 449 | SEQ ID No: 450 |
| | | | protein 1 | | | |
| FGB | 192 | 241788 | fibrinogen, b beta polypeptide | SEQ ID No: 451 | SEQ ID No: 452 | SEQ ID No: 343 |
| FGA | 193 | 244810 | fibrinogen, a alpha polypeptide | SEQ ID No: 453 | | SEQ ID No: 454 |
| CTSS | 194 | 245614 | cathepsin s | SEQ ID No: 455 | SEQ ID No: 456 | SEQ ID No: 457 |
| FAM3A | 195 | 24609 | family with sequence similarity 3, | SEQ ID No: 458 | SEQ ID No: 459 | SEQ ID No: 460 |
| | | | member a | | | |
| GSN | 196 | 246170 | gelsolin (amyloidosis, finnish type) | SEQ ID No: 461 | SEQ ID No: 462 | SEQ ID No: 463 |
| IDE | 197 | 246290 | insulin-degrading enzyme | SEQ ID No: 464 | | SEQ ID No: 465 |
| ADH4 | 198 | 246860 | alcohol dehydrogenase 4 (class ii), pi | SEQ ID No: 466 | SEQ ID No: 467 | SEQ ID No: 468 |
| | | | polypeptide | | | |
| DSC2 | 199 | 247055 | desmocollin 2 | SEQ ID No: 469 | SEQ ID No: 470 | SEQ ID No: 471 |
| K-ALPHA-1 | 200 | 247905 | tubulin, alpha, ubiquitous | SEQ ID No: 472 | | SEQ ID No: 473 |
| ATP6V1H | 201 | 247909 | atpase, h+ transporting, lysosomal | SEQ ID No: 474 | | SEQ ID No: 475 |
| | | | 50/57 kda, v1 subunit h | | | |
| COX5B | 202 | 248263 | cytochrome c oxidase subunit vb | SEQ ID No: 476 | SEQ ID No: 477 | SEQ ID No: 478 |
| DLK1 | 203 | 248701 | delta-like 1 homolog (drosophila) | SEQ ID No: 479 | | SEQ ID No: 480 |
| CNTN1 | 204 | 24884 | contactin 1 | SEQ ID No: 481 | SEQ ID No: 482 | SEQ ID No: 483 |
| CDC42 | 205 | 251772 | cell division cycle 42 (gtp binding | SEQ ID No: 484 | | SEQ ID No: 485 |
| | | | protein, 25 kda) | | | |
| SCO1 | 206 | 25222 | sco cytochrome oxidase deficient | SEQ ID No: 486 | | SEQ ID No: 487 |
| | | | homolog 1 (yeast) | | | |
| LOC51058 | 207 | 25285 | hypothetical protein loc51058 | SEQ ID No: 488 | | SEQ ID No: 489 |
| RALB | 208 | 25392 | v-ral simian leukemia viral oncogene | SEQ ID No: 490 | SEQ ID No: 491 | SEQ ID No: 492 |
| | | | homolog b (ras related; gtp binding | | | |
| | | | protein) | | | |
| RPL3 | 209 | 254505 | ribosomal protein 13 | SEQ ID No: 493 | | SEQ ID No: 494 |
| SLPI | 210 | 255348 | secretory leukocyte protease inhibitor | SEQ ID No: 495 | | SEQ ID No: 496 |
| | | | (antileukoproteinase) | | | |
| HIPK3 | 211 | 256846 | homeodomain interacting protein kinase 3 | SEQ ID No: 497 | SEQ ID No: 498 | SEQ ID No: 499 |
| NIT1 | 212 | 257170 | nitrilase 1 | SEQ ID No: 500 | SEQ ID No: 501 | SEQ ID No: 502 |
| RPL39 | 213 | 257284 | ribosomal protein 139 | SEQ ID No: 503 | | SEQ ID No: 504 |
| UCHL3 | 214 | 257445 | ubiquitin carboxyl-terminal esterase 13 | SEQ ID No: 505 | SEQ ID No: 506 | SEQ ID No: 507 |
| | | | (ubiquitin thiolesterase) | | | |
| MAD | 215 | 257519 | max dimerization protein 1 | SEQ ID No: 508 | | SEQ ID No: 509 |
| DUSP1 | 216 | 257708 | dual specificity phosphatase 1 | SEQ ID No: 510 | | SEQ ID No: 511 |
| COX7B | 217 | 258313 | cytochrome c oxidase subunit viib | SEQ ID No: 512 | | SEQ ID No: 513 |
| KRT6B | 218 | 25831 | keratin 6b | SEQ ID No: 514 | SEQ ID No: 515 | SEQ ID No: 516 |
| CYP19A1 | 219 | 258870 | cytochrome p450, family 19, subfamily | SEQ ID No: 517 | SEQ ID No: 518 | SEQ ID No: 519 |
| | | | a, polypeptide 1 | | | |
| HPSE | 220 | 260138 | heparanase | SEQ ID No: 520 | SEQ ID No: 521 | SEQ ID No: 522 |
| CTCF | 221 | 26029 | ccctc-binding factor (zinc finger | SEQ ID No: 523 | SEQ ID No: 524 | SEQ ID No: 525 |
| | | | protein) | | | |
| HMGA2 | 222 | 261204 | high mobility group at-hook 2 | SEQ ID No: 526 | | SEQ ID No: 527 |
| CTSB | 223 | 261517 | cathepsin b | SEQ ID No: 528 | | SEQ ID No: 529 |
| GK | 224 | 262425 | glycerol kinase | | SEQ ID No: 530 | SEQ ID No: 531 |
| IL6ST | 225 | 263262 | interleukin 6 signal transducer (gp 130, | SEQ ID No: 532 | | SEQ ID No: 533 |
| | | | oncostatin m receptor) | | | |
| C5ORF5 | 226 | 264183 | chromosome 5 open reading frame 5 | SEQ ID No: 534 | SEQ ID No: 535 | SEQ ID No: 536 |
| LOC57209 | 227 | 264186 | kruppel-type zinc finger protein | SEQ ID No: 537 | SEQ ID No: 538 | |
| CRYAB | 228 | 264331 | crystallin, alpha b | SEQ ID No: 539 | SEQ ID No: 540 | SEQ ID No: 541 |
| MGC9850 | 229 | 26584 | hypothetical protein mgc9850 | SEQ ID No: 542 | | SEQ ID No: 543 |
| CCT4 | 230 | 26710 | chaperonin containing tcpl, subunit 4 | SEQ ID No: 544 | SEQ ID No: 545 | SEQ ID No: 546 |
| | | | (delta) | | | |
| LIAS | 231 | 267123 | lipoic acid synthetase | SEQ ID No: 547 | SEQ ID No: 548 | SEQ ID No: 549 |
| HMGB2 | 232 | 267145 | high-mobility group box 2 | SEQ ID No: 550 | SEQ ID No: 551 | SEQ ID No: 552 |
| MAGEH1 | 233 | 267657 | apr-1 protein | SEQ ID No: 553 | SEQ ID No: 554 | SEQ ID No: 555 |
| MADH1 | 234 | 268150 | mad, mothers against decapentaplegic | SEQ ID No: 556 | SEQ ID No: 557 | SEQ ID No: 558 |
| | | | homolog 1 (drosophila) | | | |
| ACADVL | 235 | 269388 | acyl-coenzyme a dehydrogenase, very | SEQ ID No: 559 | | SEQ ID No: 560 |
| | | | long chain | | | |
| RENT1 | 236 | 26945 | regulator of nonsense transcripts 1 | SEQ ID No: 561 | SEQ ID No: 562 | SEQ ID No: 563 |
| PWP1 | 237 | 26964 | nuclear phosphoprotein similar to | SEQ ID No: 564 | SEQ ID No: 565 | SEQ ID No: 566 |
| | | | s. cerevisiae pwp1 | | | |
| PTD004 | 238 | 270794 | hypothetical protein ptd004 | SEQ ID No: 567 | SEQ ID No: 568 | SEQ ID No: 569 |
| | 239 | 27100 | | SEQ ID No: 570 | SEQ ID No: 571 | |
| ASNS | 240 | 27208 | asparagine synthetase | SEQ ID No: 572 | SEQ ID No: 573 | SEQ ID No: 574 |
| NRAS | 241 | 272189 | neuroblastoma ras viral (v-ras) | SEQ ID No: 575 | SEQ ID No: 576 | SEQ ID No: 577 |
| | | | oncogene homolog | | | |
| MORF4L1 | 242 | 27237 | mortality factor 4 like 1 | SEQ ID No: 578 | | SEQ ID No: 579 |
| CCT4 | 243 | 272502 | chaperonin containing tcp1, subunit 4 | SEQ ID No: 580 | | SEQ ID No: 546 |
| | | | (delta) | | | |
| WBSCR22 | 244 | 27326 | williams beuren syndrome chromosome | SEQ ID No: 581 | SEQ ID No: 582 | SEQ ID No: 583 |
| | | | region 22 | | | |
| GNS | 245 | 274315 | glucosamine (n-acetyl)-6-sulfatase | SEQ ID No: 584 | SEQ ID No: 585 | SEQ ID No: 586 |
| | | | (sanfilippo disease iiid) | | | |
| SLC17A7 | 246 | 27506 | solute carrier family 17 (sodium- | SEQ ID No: 587 | | SEQ ID No: 588 |
| | | | dependent inorganic phosphate | | | |
| | | | cotransporter), member 7 | | | |
| ARHT2 | 247 | 27599 | ras homolog gene family, member t2 | SEQ ID No: 589 | SEQ ID No: 590 | SEQ ID No: 591 |
| TP53BP2 | 248 | 277339 | tumor protein p53 binding protein, 2 | SEQ ID No: 592 | SEQ ID No: 593 | SEQ ID No: 594 |
| CCBL1 | 249 | 277740 | cysteine conjugate-beta lyase; | SEQ ID No: 595 | SEQ ID No: 596 | SEQ ID No: 597 |
| | | | cytoplasmic (glutamine transaminase k, | | | |
| | | | kyneurenine aminotransferase) | | | |
| ID4 | 250 | 2783684 | inhibitor of dna binding 4, dominant | SEQ ID No: 598 | SEQ ID No: 599 | SEQ ID No: 600 |
| | | | negative helix-loop-helix protein | | | |
| TUBE1 | 251 | 279460 | tubulin, epsilon 1 | SEQ ID No: 601 | SEQ ID No: 602 | SEQ ID No: 603 |
| MPDZ | 252 | 28019 | multiple pdz domain protein | SEQ ID No: 604 | SEQ ID No: 605 | SEQ ID No: 606 |
| CACNA1I | 253 | 283375 | calcium channel, voltage-dependent, | SEQ ID No: 607 | SEQ ID No: 608 | SEQ ID No: 609 |
| | | | alpha 1i subunit | | | |
| GFER | 254 | 283601 | growth factor, augmenter of liver | SEQ ID No: 610 | SEQ ID No: 611 | SEQ ID No: 612 |
| | | | regeneration (erv1 homolog, s. cerevisiae | | | |
| SNRPB2 | 255 | 284256 | small nuclear ribonucleoprotein | SEQ ID No: 613 | | SEQ ID No: 614 |
| | | | polypeptide b″ | | | |
| CHI3L2 | 256 | 284640 | chitinase 3-like 2 | SEQ ID No: 615 | | SEQ ID No: 616 |
| ABCA8 | 257 | 284828 | atp-binding cassette, sub-family a | SEQ ID No: 617 | | SEQ ID No: 618 |
| | | | (abc1), member 8 | | | |
| BTBD1 | 258 | 28577 | btb (poz) domain containing 1 | SEQ ID No: 619 | SEQ ID No: 620 | SEQ ID No: 621 |
| MMP13 | 259 | 285780 | matrix metalloproteinase 13 | SEQ ID No: 622 | | SEQ ID No: 623 |
| | | | (collagenase 3) | | | |
| GART | 260 | 28596 | phosphoribosylglycinamide | SEQ ID No: 624 | SEQ ID No: 625 | SEQ ID No: 626 |
| | | | formyltransferase, | | | |
| | | | phosphoribosylglycinamide synthetase, | | | |
| | | | phosphoribosylaminoimidazole | | | |
| | | | synthetase | | | |
| CUL2 | 261 | 286287 | cullin 2 | SEQ ID No: 627 | | SEQ ID No: 628 |
| GRM3 | 262 | 287843 | glutamate receptor, metabotropic 3 | SEQ ID No: 629 | | SEQ ID No: 630 |
| CA7 | 263 | 288874 | carbonic anhydrase vii | SEQ ID No: 631 | SEQ ID No: 632 | SEQ ID No: 633 |
| PNMT | 264 | 289857 | phenylethanolamine n- | SEQ ID No: 634 | | SEQ ID No: 635 |
| | | | methyltransferase | | | |
| SILV | 265 | 291448 | silver homolog (mouse) | SEQ ID No: 636 | SEQ ID No: 637 | SEQ ID No: 638 |
| ANK1 | 266 | 292321 | ankyrin 1, erythrocytic | SEQ ID No: 639 | SEQ ID No: 640 | SEQ ID No: 641 |
| XRCC1 | 267 | 29451 | x-ray repair complementing defective | SEQ ID No: 642 | SEQ ID No: 643 | SEQ ID No: 644 |
| | | | repair in chinese hamster cells 1 | | | |
| CSE1L | 268 | 29933 | cse1 chromosome segregation 1-like | SEQ ID No: 645 | SEQ ID No: 646 | SEQ ID No: 647 |
| | | | (yeast) | | | |
| DXS1283E | 269 | 300163 | gs2 gene | SEQ ID No: 648 | SEQ ID No: 649 | |
| TAF10 | 270 | 30066 | taf10 rna polymerase ii, tata box | SEQ ID No: 650 | | SEQ ID No: 651 |
| | | | binding protein (tbp)-associated factor, | | | |
| | | | 30 kda | | | |
| CKMT2 | 271 | 301119 | creatine kinase, mitochondrial 2 | SEQ ID No: 652 | SEQ ID No: 653 | SEQ ID No: 654 |
| | | | (sarcomeric) | | | |
| TNNC1 | 272 | 301128 | troponin c, slow | SEQ ID No: 655 | | SEQ ID No: 656 |
| DKFZP434J0617 | 273 | 301258 | hypothetical protein dkfzp434j0617 | SEQ ID No: 657 | | |
| | 274 | 302310 | homo sapiens cdna flj36340 fis, clone | SEQ ID No: 658 | SEQ ID No: 659 | |
| | | | thymu2006468. | | | |
| GUK1 | 275 | 302453 | guanylate kinase 1 | | SEQ ID No: 660 | SEQ ID No: 661 |
| HSPA9B | 276 | 305045 | heat shock 70 kda protein 9b (mortalin- | SEQ ID No: 662 | SEQ ID No: 663 | SEQ ID No: 664 |
| | | | 2) | | | |
| NDUFA6 | 277 | 306510 | nadh dehydrogenase (ubiquinone) 1 | SEQ ID No: 665 | SEQ ID No: 666 | SEQ ID No: 667 |
| | | | alpha subcomplex, 6, 14 kda | | | |
| IFNGR2 | 278 | 306555 | interferon gamma receptor 2 (interferon | SEQ ID No: 668 | SEQ ID No: 669 | SEQ ID No: 670 |
| | | | gamma transducer 1) | | | |
| HRIHFB2206 | 279 | 306697 | hrihfb2206 protein | SEQ ID No: 671 | SEQ ID No: 672 | |
| GCAT | 280 | 307094 | glycine c-acetyltransferase (2-amino-3- | SEQ ID No: 673 | SEQ ID No: 674 | SEQ ID No: 675 |
| | | | ketobutyrate coenzyme a ligase) | | | |
| CD9 | 281 | 307352 | cd9 antigen (p24) | SEQ ID No: 676 | SEQ ID No: 677 | SEQ ID No: 678 |
| ESD | 282 | 310057 | esterase d/formylglutathione hydrolase | SEQ ID No: 679 | SEQ ID No: 680 | |
| ZNF183 | 283 | 310088 | zinc finger protein 183 (ring finger, | SEQ ID No: 681 | SEQ ID No: 682 | SEQ ID No: 683 |
| | | | c3hc4 type) | | | |
| HSPA8 | 284 | 31027 | heat shock 70 kda protein 8 | SEQ ID No: 684 | SEQ ID No: 685 | SEQ ID No: 686 |
| RPL35 | 285 | 310774 | ribosomal protein 135 | SEQ ID No: 687 | SEQ ID No: 688 | SEQ ID No: 689 |
| NUDT5 | 286 | 310860 | nudix (nucleoside diphosphate linked | SEQ ID No: 690 | SEQ ID No: 691 | SEQ ID No: 692 |
| | | | moiety x)-type motif 5 | | | |
| PFDN4 | 287 | 320143 | prefoldin 4 | SEQ ID No: 693 | SEQ ID No: 694 | SEQ ID No: 695 |
| RPL37 | 288 | 320151 | ribosomal protein 137 | SEQ ID No: 696 | SEQ ID No: 697 | SEQ ID No: 698 |
| SPR | 289 | 320457 | sepiapterin reductase (7,8- | SEQ ID No: 699 | SEQ ID No: 700 | SEQ ID No: 701 |
| | | | dihydrobiopterin:nadp + | | | |
| | | | oxidoreductase) | | | |
| LOC56267 | 290 | 320775 | hypothetical protein 669 | SEQ ID No: 702 | SEQ ID No: 703 | SEQ ID No: 704 |
| RPL31 | 291 | 321259 | ribosomal protein 131 | SEQ ID No: 705 | SEQ ID No: 706 | SEQ ID No: 707 |
| SRP72 | 292 | 321510 | signal recognition particle 72 kda | SEQ ID No: 708 | SEQ ID No: 709 | SEQ ID No: 710 |
| RPS6 | 293 | 321733 | ribosomal protein s6 | SEQ ID No: 711 | SEQ ID No: 712 | SEQ ID No: 713 |
| PHKG1 | 294 | 321783 | phosphorylase kinase, gamma 1 | SEQ ID No: 714 | SEQ ID No: 715 | SEQ ID No: 716 |
| | | | (muscle) | | | |
| TACSTD1 | 295 | 321907 | tumor-associated calcium signal | SEQ ID No: 717 | SEQ ID No: 718 | SEQ ID No: 719 |
| | | | transducer 1 | | | |
| RPS27L | 296 | 321973 | ribosomal protein s27-like | SEQ ID No: 720 | SEQ ID No: 721 | SEQ ID No: 722 |
| | 297 | 321981 | loc151103 | SEQ ID No: 723 | SEQ ID No: 724 | |
| CHGA | 298 | 322452 | chromogranin a (parathyroid secretory | SEQ ID No: 725 | SEQ ID No: 726 | SEQ ID No: 727 |
| | | | protein 1) | | | |
| SNRPC | 299 | 322471 | small nuclear ribonucleoprotein | SEQ ID No: 728 | SEQ ID No: 729 | SEQ ID No: 730 |
| | | | polypeptide c | | | |
| AIP | 300 | 322495 | aryl hydrocarbon receptor interacting | SEQ ID No: 731 | SEQ ID No: 732 | SEQ ID No: 733 |
| | | | protein | | | |
| IRF1 | 301 | 323001 | interferon regulatory factor 1 | SEQ ID No: 734 | SEQ ID No: 735 | SEQ ID No: 736 |
| COX7A2 | 302 | 323650 | cytochrome c oxidase subunit viia | SEQ ID No: 737 | SEQ ID No: 738 | SEQ ID No: 739 |
| | | | polypeptide 2 (liver) | | | |
| LOC51255 | 303 | 323681 | hypothetical protein loc51255 | SEQ ID No: 740 | SEQ ID No: 741 | SEQ ID No: 742 |
| COPZ2 | 304 | 323753 | coatomer protein complex, subunit zeta 2 | SEQ ID No: 743 | SEQ ID No: 744 | SEQ ID No: 745 |
| CKAP1 | 305 | 323766 | cytoskeleton-associated protein 1 | SEQ ID No: 746 | | SEQ ID No: 747 |
| RPS3A | 306 | 323863 | ribosomal protein s3a | SEQ ID No: 748 | SEQ ID No: 749 | SEQ ID No: 750 |
| SOX9 | 307 | 323948 | sry (sex determining region y)-box 9 | SEQ ID No: 751 | | SEQ ID No: 752 |
| | | | (campomelic dysplasia, autosomal sex- | | | |
| | | | reversal) | | | |
| DSCR1 | 308 | 324006 | down syndrome critical region gene 1 | SEQ ID No: 753 | SEQ ID No: 754 | SEQ ID No: 755 |
| KRAS2 | 309 | 324257 | v-ki-ras2 kirsten rat sarcoma 2 viral | SEQ ID No: 756 | SEQ ID No: 757 | SEQ ID No: 758 |
| | | | oncogene homolog | | | |
| CTBS | 310 | 324369 | chitobiase, di-n-acetyl- | SEQ ID No: 759 | | SEQ ID No: 760 |
| PPP1R15A | 311 | 324684 | protein phosphatase 1, regulatory | SEQ ID No: 761 | SEQ ID No: 762 | SEQ ID No: 763 |
| | | | (inhibitor) subunit 15a | | | |
| RPS15A | 312 | 324757 | ribosomal protein s15a | SEQ ID No: 764 | SEQ ID No: 765 | SEQ ID No: 311 |
| SAT | 313 | 324930 | spermidine/spermine n1- | SEQ ID No: 766 | SEQ ID No: 767 | SEQ ID No: 768 |
| | | | acetyltransferase | | | |
| GRSF1 | 314 | 325058 | g-rich rna sequence binding factor 1 | SEQ ID No: 769 | SEQ ID No: 770 | SEQ ID No: 771 |
| PSG5 | 315 | 325641 | pregnancy specific beta-1-glycoprotein 5 | SEQ ID No: 772 | SEQ ID No: 773 | SEQ ID No: 774 |
| STMN4 | 316 | 32698 | stathmin-like 4 | SEQ ID No: 775 | SEQ ID No: 776 | SEQ ID No: 777 |
| CDH15 | 317 | 327684 | cadherin 15, m-cadherin (myotubule) | SEQ ID No: 778 | SEQ ID No: 779 | SEQ ID No: 780 |
| NDUFA4 | 318 | 327740 | nadh dehydrogenase (ubiquinone) 1 | SEQ ID No: 781 | SEQ ID No: 782 | SEQ ID No: 320 |
| | | | alpha subcomplex, 4, 9 kda | | | |
| RAN | 319 | 328245 | ran, member ras oncogene family | SEQ ID No: 783 | SEQ ID No: 784 | SEQ ID No: 785 |
| PNLIPRP1 | 320 | 328591 | pancreatic lipase-related protein 1 | SEQ ID No: 786 | SEQ ID No: 787 | SEQ ID No: 788 |
| CAP2 | 321 | 33005 | cap, adenylate cyclase-associated | SEQ ID No: 789 | SEQ ID No: 790 | SEQ ID No: 791 |
| | | | protein, 2 (yeast) | | | |
| NDFIP2 | 322 | 33722 | nedd4 family interacting protein 2 | | SEQ ID No: 792 | |
| ATP5C1 | 323 | 33794 | atp synthase, h+ transporting, | SEQ ID No: 793 | SEQ ID No: 794 | SEQ ID No: 109 |
| | | | mitochondrial f1 complex, gamma | | | |
| | | | polypeptide 1 | | | |
| ATP7A | 324 | 340995 | atpase, cu++ transporting, alpha | SEQ ID No: 795 | SEQ ID No: 796 | SEQ ID No: 797 |
| | | | polypeptide (menkes syndrome) | | | |
| ATP6V0B | 325 | 341121 | atpase, h+ transporting, lysosomal | SEQ ID No: 798 | SEQ ID No: 799 | SEQ ID No: 800 |
| | | | 21 kda, v0 subunit c″ | | | |
| DAD1 | 326 | 341699 | defender against cell death 1 | SEQ ID No: 801 | SEQ ID No: 802 | SEQ ID No: 803 |
| | 327 | 341834 | loc349507 | SEQ ID No: 804 | SEQ ID No: 805 | |
| | 328 | 341984 | | SEQ ID No: 806 | SEQ ID No: 807 | |
| CXORF6 | 329 | 342054 | chromosome x open reading frame 6 | SEQ ID No: 808 | SEQ ID No: 809 | SEQ ID No: 810 |
| B2M | 330 | 342416 | beta-2-microglobulin | SEQ ID No: 811 | SEQ ID No: 812 | SEQ ID No: 813 |
| CLIC5 | 331 | 34260 | chloride intracellular channel 5 | SEQ ID No: 814 | SEQ ID No: 815 | SEQ ID No: 816 |
| NDN | 332 | 343578 | necdin homolog (mouse) | SEQ ID No: 817 | SEQ ID No: 818 | SEQ ID No: 819 |
| OSBPL1A | 333 | 344037 | oxysterol binding protein-like 1a | SEQ ID No: 820 | SEQ ID No: 821 | SEQ ID No: 822 |
| COL6A1 | 334 | 344326 | collagen, type vi, alpha 1 | SEQ ID No: 823 | SEQ ID No: 824 | SEQ ID No: 825 |
| MRPS23 | 335 | 344792 | mitochondrial ribosomal protein s23 | SEQ ID No: 826 | SEQ ID No: 827 | SEQ ID No: 828 |
| PIK3CA | 336 | 345430 | phosphoinositide-3-kinase, catalytic, | SEQ ID No: 829 | SEQ ID No: 830 | SEQ ID No: 831 |
| | | | alpha polypeptide | | | |
| C6ORF9 | 337 | 345437 | chromosome 6 open reading frame 9 | SEQ ID No: 832 | SEQ ID No: 833 | SEQ ID No: 834 |
| FLJ20813 | 338 | 345648 | hypothetical protein flj20813 | SEQ ID No: 835 | SEQ ID No: 836 | SEQ ID No: 837 |
| RPS21 | 339 | 345676 | ribosomal protein s21 | SEQ ID No: 838 | SEQ ID No: 839 | SEQ ID No: 840 |
| | 340 | 345694 | | SEQ ID No: 841 | SEQ ID No: 842 | |
| CA3 | 341 | 345706 | carbonic anhydrase iii, muscle specific | SEQ ID No: 843 | SEQ ID No: 844 | SEQ ID No: 845 |
| P4HA1 | 342 | 346016 | procollagen-proline, 2-oxoglutarate 4- | SEQ ID No: 846 | SEQ ID No: 847 | SEQ ID No: 848 |
| | | | dioxygenase (proline 4-hydroxylase), | | | |
| | | | alpha polypeptide i | | | |
| COL6A2 | 343 | 346269 | collagen, type vi, alpha 2 | SEQ ID No: 849 | SEQ ID No: 850 | SEQ ID No: 851 |
| SFN | 344 | 346610 | Stratifin | SEQ ID No: 852 | SEQ ID No: 853 | SEQ ID No: 854 |
| TCEB1 | 345 | 347373 | transcription elongation factor b (siii), | SEQ ID No: 855 | SEQ ID No: 856 | SEQ ID No: 857 |
| | | | polypeptide 1 (15 kda, elongin c) | | | |
| RELN | 346 | 34888 | Reelin | SEQ ID No: 858 | SEQ ID No: 859 | SEQ ID No: 860 |
| SKP1A | 347 | 34917 | s-phase kinase-associated protein 1a | SEQ ID No: 861 | SEQ ID No: 862 | SEQ ID No: 863 |
| | | | (p19a) | | | |
| AQP1 | 348 | 35072 | aquaporin 1 (channel-forming integral | SEQ ID No: 864 | SEQ ID No: 865 | SEQ ID No: 866 |
| | | | protein, 28 kda) | | | |
| IRF2 | 349 | 35262 | interferon regulatory factor 2 | SEQ ID No: 867 | SEQ ID No: 868 | SEQ ID No: 869 |
| NGB | 350 | 35483 | Neuroglobin | SEQ ID No: 870 | SEQ ID No: 871 | SEQ ID No: 872 |
| TM4SF5 | 351 | 356783 | transmembrane 4 superfamily member 5 | SEQ ID No: 873 | SEQ ID No: 874 | SEQ ID No: 875 |
| TGFB3 | 352 | 356980 | transforming growth factor, beta 3 | SEQ ID No: 876 | SEQ ID No: 877 | SEQ ID No: 878 |
| RPA3 | 353 | 357239 | replication protein a3, 14 kda | SEQ ID No: 879 | SEQ ID No: 880 | SEQ ID No: 881 |
| SEMA3C | 354 | 357820 | sema domain, immunoglobulin domain | SEQ ID No: 882 | SEQ ID No: 883 | SEQ ID No: 884 |
| | | | (ig), short basic domain, secreted, | | | |
| | | | (semaphorin) 3c | | | |
| CNOT2 | 355 | 357893 | ccr4-not transcription complex, subunit 2 | SEQ ID No: 885 | | SEQ ID No: 886 |
| CDW52 | 356 | 358041 | cdw52 antigen (campath-1 antigen) | SEQ ID No: 887 | SEQ ID No: 888 | SEQ ID No: 889 |
| SOX9 | 357 | 358117 | sry (sex determining region y)-box 9 | SEQ ID No: 890 | SEQ ID No: 891 | SEQ ID No: 752 |
| | | | (campomelic dysplasia, autosomal sex- | | | |
| | | | reversal) | | | |
| HSU79266 | 358 | 358162 | protein predicted by clone 23627 | SEQ ID No: 892 | SEQ ID No: 893 | SEQ ID No: 894 |
| PFDN2 | 359 | 358267 | prefoldin 2 | SEQ ID No: 895 | SEQ ID No: 896 | SEQ ID No: 897 |
| TPM1 | 360 | 358683 | tropomyosin 1 (alpha) | SEQ ID No: 898 | SEQ ID No: 899 | SEQ ID No: 900 |
| FLJ21272 | 361 | 358943 | hypothetical protein flj21272 | SEQ ID No: 901 | SEQ ID No: 902 | SEQ ID No: 903 |
| PSMC2 | 362 | 358993 | proteasome (prosome, macropain) 26s | SEQ ID No: 904 | | SEQ ID No: 905 |
| | | | subunit, atpase, 2 | | | |
| CKS2 | 363 | 359119 | cdc28 protein kinase regulatory subunit 2 | SEQ ID No: 906 | | SEQ ID No: 907 |
| NDUFA9 | 364 | 359147 | nadh dehydrogenase (ubiquinone) 1 | SEQ ID No: 908 | | SEQ ID No: 909 |
| | | | alpha subcomplex, 9, 39 kda | | | |
| H11 | 365 | 359191 | protein kinase h11 | SEQ ID No: 910 | | SEQ ID No: 911 |
| CA4 | 366 | 359250 | carbonic anhydrase iv | SEQ ID No: 912 | SEQ ID No: 913 | SEQ ID No: 914 |
| PRSS3 | 367 | 359254 | protease, serine, 3 (mesotrypsin) | SEQ ID No: 915 | SEQ ID No: 916 | SEQ ID No: 917 |
| | 368 | 360588 | homo sapiens transcribed sequence with | SEQ ID No: 918 | | |
| | | | moderate similarity to protein | | | |
| | | | ref: np_036199.1 (h. sapiens) aldo-keto | | | |
| | | | reductase family 7, member a3 | | | |
| | | | (aflatoxin aldehyde reductase) [homo | | | |
| | | | sapiens] | | | |
| HIG1 | 369 | 361108 | likely ortholog of mouse hypoxia | SEQ ID No: 919 | SEQ ID No: 920 | SEQ ID No: 921 |
| | | | induced gene 1 | | | |
| | 370 | 363273 | | SEQ ID No: 922 | SEQ ID No: 923 | |
| ADD1 | 371 | 363991 | adducin 1 (alpha) | SEQ ID No: 924 | SEQ ID No: 925 | SEQ ID No: 68 |
| LAMB1 | 372 | 364012 | laminin, beta 1 | SEQ ID No: 926 | SEQ ID No: 927 | SEQ ID No: 928 |
| CD5 | 373 | 364687 | cd5 antigen (p56-62) | SEQ ID No: 929 | SEQ ID No: 930 | SEQ ID No: 931 |
| UQCR | 374 | 36607 | ubiquinol-cytochrome c reductase | SEQ ID No: 932 | SEQ ID No: 933 | SEQ ID No: 934 |
| | | | (6.4 kd) subunit | | | |
| RAP2A | 375 | 36684 | rap2a, member of ras oncogene family | SEQ ID No: 935 | SEQ ID No: 936 | SEQ ID No: 937 |
| RGS6 | 376 | 36710 | regulator of g-protein signalling 6 | SEQ ID No: 938 | SEQ ID No: 939 | SEQ ID No: 940 |
| IL1RN | 377 | 36844 | interleukin 1 receptor antagonist | SEQ ID No: 941 | SEQ ID No: 942 | SEQ ID No: 943 |
| LRP1 | 378 | 37345 | low density lipoprotein-related protein | SEQ ID No: 944 | SEQ ID No: 945 | SEQ ID No: 946 |
| | | | 1 (alpha-2-macroglobulin receptor) | | | |
| DJ1042K10.2 | 379 | 37496 | hypothetical protein dj1042k10.2 | SEQ ID No: 947 | SEQ ID No: 948 | SEQ ID No: 949 |
| PTPRN2 | 380 | 37506 | protein tyrosine phosphatase, receptor | SEQ ID No: 950 | SEQ ID No: 951 | SEQ ID No: 952 |
| | | | type, n polypeptide 2 | | | |
| CCNB2 | 381 | 375781 | cyclin b2 | SEQ ID No: 953 | SEQ ID No: 954 | SEQ ID No: 955 |
| TCTEL1 | 382 | 376284 | t-complex-associated-testis-expressed | SEQ ID No: 956 | SEQ ID No: 957 | SEQ ID No: 958 |
| | | | 1-like 1 | | | |
| TUBB | 383 | 37630 | tubulin, beta polypeptide | SEQ ID No: 959 | | SEQ ID No: 960 |
| RHEB | 384 | 376473 | ras homolog enriched in brain | SEQ ID No: 961 | SEQ ID No: 962 | SEQ ID No: 963 |
| VCP | 385 | 376547 | valosin-containing protein | SEQ ID No: 964 | | SEQ ID No: 965 |
| IL2RB | 386 | 376696 | interleukin 2 receptor, beta | SEQ ID No: 966 | SEQ ID No: 967 | SEQ ID No: 152 |
| TAZ | 387 | 376755 | transcriptional co-activator with pdz- | SEQ ID No: 968 | SEQ ID No: 969 | SEQ ID No: 970 |
| | | | binding motif (taz) | | | |
| HSPC150 | 388 | 376769 | hspc150 protein similar to ubiquitin- | SEQ ID No: 971 | SEQ ID No: 972 | SEQ ID No: 973 |
| | | | conjugating enzyme | | | |
| PLCD4 | 389 | 376802 | phospholipase c, delta 4 | SEQ ID No: 974 | SEQ ID No: 975 | SEQ ID No: 976 |
| NR2F6 | 390 | 377020 | nuclear receptor subfamily 2, group f, | | SEQ ID No: 977 | SEQ ID No: 978 |
| | | | member 6 | | | |
| MTPN | 391 | 377545 | Myotrophin | SEQ ID No: 979 | | SEQ ID No: 980 |
| SLPI | 392 | 378813 | secretory leukocyte protease inhibitor | SEQ ID No: 981 | | SEQ ID No: 496 |
| | | | (antileukoproteinase) | | | |
| KPNA1 | 393 | 38056 | karyopherin alpha 1 (importin alpha 5) | SEQ ID No: 982 | SEQ ID No: 983 | SEQ ID No: 984 |
| LAMR1 | 394 | 383433 | laminin receptor 1 (ribosomal protein | SEQ ID No: 985 | SEQ ID No: 986 | SEQ ID No: 987 |
| | | | sa, 67 kda) | | | |
| SST | 395 | 39593 | Somatostatin | SEQ ID No: 988 | | SEQ ID No: 989 |
| ABCA5 | 396 | 39821 | atp-binding cassette, sub-family a | SEQ ID No: 990 | SEQ ID No: 991 | SEQ ID No: 992 |
| | | | (abc1), member 5 | | | |
| NME1 | 397 | 39961 | non-metastatic cells 1, protein (nm23a) | SEQ ID No: 993 | SEQ ID No: 994 | SEQ ID No: 288 |
| | | | expressed in | | | |
| ADAM23 | 398 | 39972 | a disintegrin and metalloproteinase | SEQ ID No: 995 | SEQ ID No: 996 | SEQ ID No: 997 |
| | | | domain 23 | | | |
| CYCS | 399 | 40017 | cytochrome c, somatic | SEQ ID No: 998 | SEQ ID No: 999 | SEQ ID No: 1000 |
| GCNIL1 | 400 | 40567 | gcn1 general control of amino-acid | SEQ ID No: 1001 | SEQ ID No: 1002 | |
| | | | synthesis 1-like 1 (yeast) | | | |
| RBBP1 | 401 | 40721 | retinoblastoma binding protein 1 | SEQ ID No: 1003 | SEQ ID No: 1004 | SEQ ID No: 1005 |
| CNN3 | 402 | 41099 | calponin 3, acidic | SEQ ID No: 1006 | SEQ ID No: 1007 | SEQ ID No: 1008 |
| RPL24 | 403 | 41411 | ribosomal protein 124 | SEQ ID No: 1009 | SEQ ID No: 1010 | SEQ ID No: 1011 |
| SAT | 404 | 41452 | spermidine/spermine n1- | SEQ ID No: 1012 | SEQ ID No: 1013 | SEQ ID No: 768 |
| | | | acetyltransferase | | | |
| SNRPE | 405 | 415389 | small nuclear ribonucleoprotein | SEQ ID No: 1014 | SEQ ID No: 1015 | SEQ ID No: 1016 |
| | | | polypeptide e | | | |
| ARG1 | 406 | 416060 | arginase, liver | SEQ ID No: 1017 | SEQ ID No: 1018 | SEQ ID No: 1019 |
| IL13RA2 | 407 | 41648 | interleukin 13 receptor, alpha 2 | SEQ ID No: 1020 | SEQ ID No: 1021 | SEQ ID No: 1022 |
| TXN | 408 | 416946 | Thioredoxin | SEQ ID No: 1023 | SEQ ID No: 1024 | SEQ ID No: 1025 |
| TFR2 | 409 | 417861 | transferrin receptor 2 | SEQ ID No: 1026 | SEQ ID No: 1027 | SEQ ID No: 1028 |
| NUTF2 | 410 | 41857 | nuclear transport factor 2 | SEQ ID No: 1029 | | SEQ ID No: 1030 |
| P2RX4 | 411 | 42118 | purinergic receptor p2x, ligand-gated | SEQ ID No: 1031 | SEQ ID No: 1032 | SEQ ID No: 1033 |
| | | | ion channel, 4 | | | |
| SYK | 412 | 42214 | spleen tyrosine kinase | SEQ ID No: 1034 | SEQ ID No: 1035 | SEQ ID No: 1036 |
| GPC6 | 413 | 427858 | glypican 6 | SEQ ID No: 1037 | SEQ ID No: 1038 | SEQ ID No: 1039 |
| CD1C | 414 | 428103 | cd1c antigen, c polypeptide | SEQ ID No: 1040 | SEQ ID No: 1041 | SEQ ID No: 1042 |
| CYCS | 415 | 429544 | cytochrome c, somatic | SEQ ID No: 1043 | SEQ ID No: 1044 | SEQ ID No: 1000 |
| TNFRSF7 | 416 | 430090 | tumor necrosis factor receptor | SEQ ID No: 1045 | SEQ ID No: 1046 | SEQ ID No: 1047 |
| | | | superfamily, member 7 | | | |
| | 417 | 43207 | homo sapiens transcribed sequence with | SEQ ID No: 1048 | SEQ ID No: 1049 | |
| | | | strong similarity to protein sp: o00451 | | | |
| | | | (h. sapiens) nrtr_human neurturin | | | |
| | | | receptor alpha precursor (ntnr-alpha) | | | |
| | | | (nrtnr-alpha) (tgf-beta related | | | |
| | | | neurotrophic factor receptor 2) (gdnf | | | |
| | | | receptor beta) (gdnfr-beta) (ret ligand 2) | | | |
| | | | (gfr-alpha 2) | | | |
| GALNACT-2 | 418 | 43276 | chondroitin sulfate galnact-2 | SEQ ID No: 1050 | | SEQ ID No: 1051 |
| F5 | 419 | 433155 | coagulation factor v (proaccelerin, | SEQ ID No: 1052 | | SEQ ID No: 1053 |
| | | | labile factor) | | | |
| | 420 | 43338 | homo sapiens transcribed sequence with | SEQ ID No: 1054 | | |
| | | | moderate similarity to protein | | | |
| | | | ref: np_004491.1 (h. sapiens) | | | |
| | | | heterogeneous nuclear | | | |
| | | | ribonucleoprotein c, isoform b; nuclear | | | |
| | | | ribonucleoprotein particle c1 protein; | | | |
| | | | nuclear ribonucleoprotein particle c2 | | | |
| | | | protein [homo sapiens] | | | |
| RPL15 | 421 | 43442 | ribosomal protein 115 | SEQ ID No: 1055 | | SEQ ID No: 1056 |
| RPS28 | 422 | 43493 | ribosomal protein s28 | SEQ ID No: 1057 | SEQ ID No: 1058 | SEQ ID No: 1059 |
| LDHA | 423 | 43550 | lactate dehydrogenase a | SEQ ID No: 1060 | | SEQ ID No: 1061 |
| RAN | 424 | 43638 | ran, member ras oncogene family | SEQ ID No: 1062 | SEQ ID No: 1063 | SEQ ID No: 785 |
| PPP2CA | 425 | 43760 | protein phosphatase 2 (formerly 2a), | SEQ ID No: 1064 | SEQ ID No: 1065 | SEQ ID No: 1066 |
| | | | catalytic subunit, alpha isoform | | | |
| CSNK2A1 | 426 | 43941 | casein kinase 2, alpha 1 polypeptide | SEQ ID No: 1067 | SEQ ID No: 1068 | SEQ ID No: 1069 |
| CCT3 | 427 | 44152 | chaperonin containing tcp1, subunit 3 | SEQ ID No: 1070 | SEQ ID No: 1071 | SEQ ID No: 1072 |
| | | | (gamma) | | | |
| LOC115286 | 428 | 45021 | hypothetical protein loc115286 | SEQ ID No: 1073 | SEQ ID No: 1074 | SEQ ID No: 1075 |
| SNCA | 429 | 45086 | synuclein, alpha (non a4 component of | SEQ ID No: 1076 | SEQ ID No: 1077 | SEQ ID No: 1078 |
| | | | amyloid precursor) | | | |
| MORF4L2 | 430 | 45706 | mortality factor 4 like 2 | SEQ ID No: 1079 | | SEQ ID No: 1080 |
| YWHAB | 431 | 45831 | tyrosine 3-monooxygenase/tryptophan | SEQ ID No: 1081 | SEQ ID No: 1082 | SEQ ID No: 1083 |
| | | | 5-monooxygenase activation protein, | | | |
| | | | beta polypeptide | | | |
| PCSK7 | 432 | 45900 | proprotein convertase subtilisin/kexin | SEQ ID No: 1084 | | SEQ ID No: 1085 |
| | | | type 7 | | | |
| COX7A2L | 433 | 46147 | cytochrome c oxidase subunit viia | SEQ ID No: 1086 | SEQ ID No: 1087 | SEQ ID No: 117 |
| | | | polypeptide 2 like | | | |
| DTNA | 434 | 46518 | dystrobrevin, alpha | SEQ ID No: 1088 | SEQ ID No: 1089 | SEQ ID No: 1090 |
| PPP1R7 | 435 | 46888 | protein phosphatase 1, regulatory | SEQ ID No: 1091 | SEQ ID No: 1092 | SEQ ID No: 1093 |
| | | | subunit 7 | | | |
| KCNMB1 | 436 | 470122 | potassium large conductance calcium- | SEQ ID No: 1094 | SEQ ID No: 1095 | SEQ ID No: 1096 |
| | | | activated channel, subfamily m, beta | | | |
| | | | member 1 | | | |
| MTCP1 | 437 | 470175 | mature t-cell proliferation 1 | SEQ ID No: 1097 | SEQ ID No: 1098 | SEQ ID No: 1099 |
| CNTNAP1 | 438 | 470279 | contactin associated protein 1 | SEQ ID No: 1100 | | SEQ ID No: 1101 |
| LOC90139 | 439 | 470819 | tetraspanin similiar to uroplakin 1 | SEQ ID No: 1102 | | SEQ ID No: 1103 |
| MRE11A | 440 | 471256 | mre11 meiotic recombination 11 | SEQ ID No: 1104 | SEQ ID No: 1105 | SEQ ID No: 1106 |
| | | | homolog a (s. cerevisiae) | | | |
| ICAM2 | 441 | 471918 | intercellular adhesion molecule 2 | SEQ ID No: 1107 | | SEQ ID No: 1108 |
| BZRP | 442 | 472021 | benzodiazapine receptor (peripheral) | SEQ ID No: 1109 | SEQ ID No: 1110 | SEQ ID No: 1111 |
| | 443 | 47986 | | | SEQ ID No: 1112 | |
| ITGB3 | 444 | 484874 | integrin, beta 3 (platelet glycoprotein | SEQ ID No: 1113 | | SEQ ID No: 1114 |
| | | | iiia, antigen cd61) | | | |
| | 445 | 485742 | similar to hypothetical protein | SEQ ID No: 1115 | SEQ ID No: 1116 | |
| | | | bc015353 | | | |
| CABC1 | 446 | 486151 | chaperone, abc1 activity of bc1 | SEQ ID No: 1117 | SEQ ID No: 1118 | SEQ ID No: 1119 |
| | | | complex like (s. pombe) | | | |
| RY1 | 447 | 486400 | putative nucleic acid binding protein ry-1 | SEQ ID No: 1120 | SEQ ID No: 1121 | SEQ ID No: 1122 |
| CDH13 | 448 | 486510 | cadherin 13, h-cadherin (heart) | SEQ ID No: 1123 | SEQ ID No: 1124 | SEQ ID No: 1125 |
| SRP19 | 449 | 486702 | signal recognition particle 19 kda | SEQ ID No: 1126 | SEQ ID No: 1127 | SEQ ID No: 1128 |
| MIF | 450 | 488144 | macrophage migration inhibitory factor | | SEQ ID No: 1129 | SEQ ID No: 1130 |
| | | | (glycosylation-inhibiting factor) | | | |
| LTBP1 | 451 | 488316 | latent transforming growth factor beta | SEQ ID No: 1131 | SEQ ID No: 1132 | SEQ ID No: 1133 |
| | | | binding protein 1 | | | |
| ZNF354A | 452 | 488412 | zinc finger protein 354a | SEQ ID No: 1134 | SEQ ID No: 1135 | SEQ ID No: 1136 |
| TLE2 | 453 | 488430 | transducin-like enhancer of split 2 | SEQ ID No: 1137 | SEQ ID No: 1138 | SEQ ID No: 1139 |
| | | | (e(sp1) homolog, drosophila) | | | |
| MYH11 | 454 | 488526 | myosin, heavy polypeptide 11, smooth | SEQ ID No: 1140 | SEQ ID No: 1141 | SEQ ID No: 1142 |
| | | | muscle | | | |
| PIP5K1A | 455 | 488875 | phosphatidylinositol-4-phosphate 5- | SEQ ID No: 1143 | SEQ ID No: 1144 | SEQ ID No: 1145 |
| | | | kinase, type i, alpha | | | |
| MFAP3 | 456 | 488913 | microfibrillar-associated protein 3 | SEQ ID No: 1146 | SEQ ID No: 1147 | SEQ ID No: 1148 |
| GTF2H4 | 457 | 489497 | general transcription factor iih, | SEQ ID No: 1149 | SEQ ID No: 1150 | SEQ ID No: 1151 |
| | | | polypeptide 4, 52 kda | | | |
| LRPPRC | 458 | 489772 | leucine-rich ppr-motif containing | SEQ ID No: 1152 | SEQ ID No: 1153 | SEQ ID No: 1154 |
| KIAA0232 | 459 | 489950 | kiaa0232 gene product | SEQ ID No: 1155 | SEQ ID No: 1156 | |
| GTF2F1 | 460 | 489961 | general transcription factor iif, | SEQ ID No: 1157 | SEQ ID No: 1158 | SEQ ID No: 1159 |
| | | | polypeptide 1, 74 kda | | | |
| PSMD3 | 461 | 490174 | proteasome (prosome, macropain) 26s | SEQ ID No: 1160 | SEQ ID No: 1161 | SEQ ID No: 1162 |
| | | | subunit, non-atpase, 3 | | | |
| DF | 462 | 491284 | d component of complement (adipsin) | SEQ ID No: 1163 | | SEQ ID No: 1164 |
| PRNP | 463 | 49691 | prion protein (p27-30) (creutzfeld-jakob | SEQ ID No: 1165 | SEQ ID No: 1166 | SEQ ID No: 1167 |
| | | | disease, gerstmann-strausler-scheinker | | | |
| | | | syndrome, fatal familial insomnia) | | | |
| | 464 | 501939 | homo sapiens transcribed sequence with | SEQ ID No: 1168 | SEQ ID No: 1169 | |
| | | | strong similarity to protein | | | |
| | | | ref: np_057457.1 (h. sapiens) ww | | | |
| | | | domain-containing oxidoreductase, | | | |
| | | | isoform 1; ww domain-containing | | | |
| | | | protein wwox; fragile site fra16d | | | |
| | | | oxidoreductase; fragile 16d oxido | | | |
| | | | reductase [homo sapiens] | | | |
| CCL11 | 465 | 502658 | chemokine (c—c motif) ligand 11 | SEQ ID No: 1170 | SEQ ID No: 1171 | SEQ ID No: 1172 |
| ARHA | 466 | 503820 | ras homolog gene family, member a | SEQ ID No: 1173 | SEQ ID No: 1174 | SEQ ID No: 1175 |
| ETFB | 467 | 504184 | electron-transfer-flavoprotein, beta | SEQ ID No: 1176 | | SEQ ID No: 1177 |
| | | | polypeptide | | | |
| ZNF3 | 468 | 504811 | zinc finger protein 3 (a8-51) | SEQ ID No: 1178 | | SEQ ID No: 1179 |
| PYGL | 469 | 505573 | phosphorylase, glycogen; liver (hers | SEQ ID No: 1180 | | SEQ ID No: 1181 |
| | | | disease, glycogen storage disease type | | | |
| | | | vi) | | | |
| PRKCB1 | 470 | 50561 | protein kinase c, beta 1 | SEQ ID No: 1182 | SEQ ID No: 1183 | SEQ ID No: 1184 |
| FNBP3 | 471 | 509515 | formin binding protein 3 | SEQ ID No: 1185 | SEQ ID No: 1186 | SEQ ID No: 1187 |
| GNG12 | 472 | 509584 | guanine nucleotide binding protein (g | SEQ ID No: 1188 | | SEQ ID No: 1189 |
| | | | protein), gamma 12 | | | |
| TAF12 | 473 | 509588 | taf12 rna polymerase ii, tata box | SEQ ID No: 1190 | SEQ ID No: 1191 | SEQ ID No: 1192 |
| | | | binding protein (tbp)-associated factor, | | | |
| | | | 20 kda | | | |
| RPL27A | 474 | 509719 | ribosomal protein l27a | SEQ ID No: 1193 | SEQ ID No: 1194 | SEQ ID No: 1195 |
| PHB | 475 | 509735 | prohibitin | SEQ ID No: 1196 | SEQ ID No: 1197 | SEQ ID No: 1198 |
| SFRS9 | 476 | 509751 | splicing factor, arginine/serine-rich 9 | SEQ ID No: 1199 | | SEQ ID No: 1200 |
| NONO | 477 | 509887 | non-pou domain containing, octamer- | SEQ ID No: 1201 | SEQ ID No: 1202 | SEQ ID No: 1203 |
| | | | binding | | | |
| CDH17 | 478 | 510130 | cadherin 17, li cadherin (liver-intestine) | SEQ ID No: 1204 | SEQ ID No: 1205 | SEQ ID No: 1206 |
| CCT5 | 479 | 510161 | chaperonin containing tcp1, subunit 5 | SEQ ID No: 1207 | | SEQ ID No: 1208 |
| | | | (epsilon) | | | |
| RRM2 | 480 | 510231 | ribonucleotide reductase m2 | SEQ ID No: 1209 | SEQ ID No: 1210 | SEQ ID No: 1211 |
| | | | polypeptide | | | |
| ENO1 | 481 | 510235 | enolase 1, (alpha) | SEQ ID No: 1212 | SEQ ID No: 1213 | SEQ ID No: 1214 |
| DKFZP564B1023 | 482 | 510354 | hypothetical protein dkfzp564b1023 | SEQ ID No: 1215 | SEQ ID No: 1216 | SEQ ID No: 1217 |
| PPEF1 | 483 | 51064 | protein phosphatase, ef hand calcium- | SEQ ID No: 1218 | SEQ ID No: 1219 | SEQ ID No: 1220 |
| | | | binding domain 1 | | | |
| CKB | 484 | 510977 | creatine kinase, brain | SEQ ID No: 1221 | SEQ ID No: 1222 | SEQ ID No: 1223 |
| TM4SF1 | 485 | 511778 | transmembrane 4 superfamily member 1 | SEQ ID No: 1224 | SEQ ID No: 1225 | SEQ ID No: 1226 |
| UBE2D3 | 486 | 512000 | ubiquitin-conjugating enzyme e2d 3 | SEQ ID No: 1227 | SEQ ID No: 1228 | SEQ ID No: 1229 |
| | | | (ubc4/5 homolog, yeast) | | | |
| MRG2 | 487 | 512333 | likely ortholog of mouse myeloid | SEQ ID No: 1230 | | |
| | | | ecotropic viral integration site-related | | | |
| | | | gene 2 | | | |
| AK5 | 488 | 512824 | adenylate kinase 5 | SEQ ID No: 1231 | | SEQ ID No: 1232 |
| | 489 | 512924 | | SEQ ID No: 1233 | SEQ ID No: 1234 | |
| | 490 | 513189 | | SEQ ID No: 1235 | | |
| GADD45A | 491 | 52065 | growth arrest and dna-damage- | SEQ ID No: 1236 | | SEQ ID No: 1237 |
| | | | inducible, alpha | | | |
| GRIA1 | 492 | 52228 | glutamate receptor, ionotropic, ampa 1 | SEQ ID No: 1238 | SEQ ID No: 1239 | SEQ ID No: 1240 |
| IDH1 | 493 | 525983 | isocitrate dehydrogenase 1 (nadp+), | SEQ ID No: 1241 | SEQ ID No: 1242 | SEQ ID No: 1243 |
| | | | soluble | | | |
| | 494 | 526038 | | SEQ ID No: 1244 | SEQ ID No: 1245 | |
| PTK2 | 495 | 52982 | ptk2 protein tyrosine kinase 2 | SEQ ID No: 1246 | SEQ ID No: 1247 | SEQ ID No: 1248 |
| CBR3 | 496 | 529844 | carbonyl reductase 3 | SEQ ID No: 1249 | SEQ ID No: 1250 | SEQ ID No: 1251 |
| COX7A2 | 497 | 529882 | cytochrome c oxidase subunit viia | SEQ ID No: 1252 | SEQ ID No: 1253 | SEQ ID No: 739 |
| | | | polypeptide 2 (liver) | | | |
| | 498 | 530034 | | SEQ ID No: 1254 | SEQ ID No: 1255 | |
| | 499 | 530037 | | SEQ ID No: 1256 | SEQ ID No: 1257 | |
| UBA52 | 500 | 530069 | ubiquitin a-52 residue ribosomal protein | SEQ ID No: 1258 | SEQ ID No: 1259 | SEQ ID No: 393 |
| | | | fusion product 1 | | | |
| COX7C | 501 | 530338 | cytochrome c oxidase subunit viic | SEQ ID No: 1260 | SEQ ID No: 1261 | SEQ ID No: 1262 |
| RPL5 | 502 | 530368 | ribosomal protein 15 | SEQ ID No: 1263 | SEQ ID No: 1264 | SEQ ID No: 1265 |
| FLIPT1 | 503 | 53061 | fly-like putative organic ion transporter 1 | SEQ ID No: 1266 | SEQ ID No: 1267 | SEQ ID No: 1268 |
| | 504 | 530744 | homo sapiens cyclophilin mrna, | SEQ ID No: 1269 | SEQ ID No: 1270 | |
| | | | complete cds | | | |
| RPL13A | 505 | 530773 | ribosomal protein l13a | SEQ ID No: 1271 | SEQ ID No: 1272 | SEQ ID No: 1273 |
| | 506 | 531366 | | SEQ ID No: 1274 | SEQ ID No: 1275 | |
| EPS15R | 507 | 531496 | epidermal growth factor receptor | SEQ ID No: 1276 | SEQ ID No: 1277 | SEQ ID No: 1278 |
| | | | substrate eps15r | | | |
| STMN1 | 508 | 53227 | stathmin 1/oncoprotein 18 | SEQ ID No: 1279 | SEQ ID No: 1280 | SEQ ID No: 1281 |
| MDH1 | 509 | 53316 | malate dehydrogenase 1, nad (soluble) | SEQ ID No: 1282 | | SEQ ID No: 1283 |
| | 510 | 53331 | loc350717 | SEQ ID No: 1284 | | |
| HCNGP | 511 | 544680 | transcriptional regulator protein | SEQ ID No: 1285 | SEQ ID No: 1286 | SEQ ID No: 1287 |
| | 512 | 544767 | | SEQ ID No: 1288 | SEQ ID No: 1289 | |
| | 513 | 544806 | | SEQ ID No: 1290 | SEQ ID No: 1291 | |
| TMSB4X | 514 | 544841 | thymosin, beta 4, x chromosome | SEQ ID No: 1292 | SEQ ID No: 1293 | SEQ ID No: 1294 |
| | 515 | 544875 | | SEQ ID No: 1295 | SEQ ID No: 1296 | |
| RPL5 | 516 | 544885 | ribosomal protein l5 | SEQ ID No: 1297 | SEQ ID No: 1298 | SEQ ID No: 1265 |
| | 517 | 545000 | | SEQ ID No: 1299 | SEQ ID No: 1300 | |
| | 518 | 545236 | | SEQ ID No: 1301 | SEQ ID No: 1302 | |
| LOC92906 | 519 | 545423 | hypothetical protein bc008217 | SEQ ID No: 1303 | SEQ ID No: 1304 | SEQ ID No: 30 |
| RPL29 | 520 | 545580 | ribosomal protein l29 | SEQ ID No: 1305 | SEQ ID No: 1306 | SEQ ID No: 1307 |
| TM9SF2 | 521 | 546351 | transmembrane 9 superfamily member 2 | SEQ ID No: 1308 | | SEQ ID No: 1309 |
| GNB2L1 | 522 | 546439 | guanine nucleotide binding protein (g | SEQ ID No: 1310 | SEQ ID No: 1311 | SEQ ID No: 1312 |
| | | | protein), beta polypeptide 2-like 1 | | | |
| WASF3 | 523 | 546460 | was protein family, member 3 | SEQ ID No: 1313 | SEQ ID No: 1314 | SEQ ID No: 1315 |
| RAB7 | 524 | 546545 | rab7, member ras oncogene family | SEQ ID No: 1316 | SEQ ID No: 1317 | SEQ ID No: 1318 |
| RPS8 | 525 | 546664 | ribosomal protein s8 | SEQ ID No: 1319 | SEQ ID No: 1320 | SEQ ID No: 1321 |
| | 526 | 546935 | | SEQ ID No: 1322 | SEQ ID No: 1323 | |
| | 527 | 547224 | | SEQ ID No: 1324 | SEQ ID No: 1325 | |
| | 528 | 547334 | | SEQ ID No: 1326 | SEQ ID No: 1327 | |
| WASL | 529 | 547443 | wiskott-aldrich syndrome-like | SEQ ID No: 1328 | | SEQ ID No: 1329 |
| RPL10A | 530 | 548702 | ribosomal protein l10a | SEQ ID No: 1330 | SEQ ID No: 1331 | SEQ ID No: 1332 |
| BOP1 | 531 | 548777 | block of proliferation 1 | SEQ ID No: 1333 | SEQ ID No: 1334 | SEQ ID No: 1335 |
| G22P1 | 532 | 549065 | thyroid autoantigen 70 kda (ku antigen) | SEQ ID No: 1336 | SEQ ID No: 1337 | SEQ ID No: 1338 |
| ARSD | 533 | 549139 | arylsulfatase d | SEQ ID No: 1339 | SEQ ID No: 1340 | SEQ ID No: 1341 |
| RPS8 | 534 | 549152 | ribosomal protein s8 | SEQ ID No: 1342 | SEQ ID No: 1343 | SEQ ID No: 1321 |
| EIF3S2 | 535 | 549173 | eukaryotic translation initiation factor 3, | SEQ ID No: 1344 | SEQ ID No: 1345 | SEQ ID No: 1346 |
| | | | subunit 2 beta, 36 kda | | | |
| YWHAQ | 536 | 549178 | tyrosine 3-monooxygenase/tryptophan | SEQ ID No: 1347 | | SEQ ID No: 1348 |
| | | | 5-monooxygenase activation protein, | | | |
| | | | theta polypeptide | | | |
| RPL5 | 537 | 549200 | ribosomal protein 15 | SEQ ID No: 1349 | SEQ ID No: 1350 | SEQ ID No: 1265 |
| NPM1 | 538 | 549212 | nucleophosmin (nucleolar | | SEQ ID No: 1351 | SEQ ID No: 1352 |
| | | | phosphoprotein b23, numatrin) | | | |
| COX5B | 539 | 549361 | cytochrome c oxidase subunit vb | SEQ ID No: 1353 | | SEQ ID No: 478 |
| PPP2CA | 540 | 550315 | protein phosphatase 2 (formerly 2a), | SEQ ID No: 1354 | SEQ ID No: 1355 | SEQ ID No: 1066 |
| | | | catalytic subunit, alpha isoform | | | |
| MYH1 | 541 | 561922 | myosin, heavy polypeptide 1, skeletal | SEQ ID No: 1356 | SEQ ID No: 1357 | SEQ ID No: 1358 |
| | | | muscle, adult | | | |
| ACTA1 | 542 | 561948 | actin, alpha 1, skeletal muscle | SEQ ID No: 1359 | SEQ ID No: 1360 | SEQ ID No: 1361 |
| TTN | 543 | 562021 | titin | SEQ ID No: 1362 | SEQ ID No: 1363 | SEQ ID No: 1364 |
| XRCC5 | 544 | 563112 | x-ray repair complementing defective | SEQ ID No: 1365 | | SEQ ID No: 1366 |
| | | | repair in chinese hamster cells 5 | | | |
| | | | (double-strand-break rejoining; ku | | | |
| | | | autoantigen, 80 kda) | | | |
| CCNB1 | 545 | 563130 | cyclin b1 | SEQ ID No: 1367 | SEQ ID No: 1368 | SEQ ID No: 1369 |
| HSPD1 | 546 | 563819 | heat shock 60 kda protein 1 (chaperonin) | SEQ ID No: 1370 | SEQ ID No: 1371 | SEQ ID No: 1372 |
| HMGB1 | 547 | 564501 | high-mobility group box 1 | SEQ ID No: 1373 | | SEQ ID No: 1374 |
| SP3 | 548 | 564535 | sp3 transcription factor | SEQ ID No: 1375 | SEQ ID No: 1376 | |
| GSTT2 | 549 | 564547 | glutathione s-transferase theta 2 | SEQ ID No: 1377 | SEQ ID No: 1378 | SEQ ID No: 1379 |
| XRCC5 | 550 | 587547 | x-ray repair complementing defective | SEQ ID No: 1380 | SEQ ID No: 1381 | SEQ ID No: 1366 |
| | | | repair in chinese hamster cells 5 | | | |
| | | | (double-strand-break rejoining; ku | | | |
| | | | autoantigen, 80 kda) | | | |
| CRNKL1 | 551 | 590592 | crn, crooked neck-like 1 (drosophila) | SEQ ID No: 1382 | SEQ ID No: 1383 | SEQ ID No: 1384 |
| UBE2C | 552 | 592041 | ubiquitin-conjugating enzyme e2c | SEQ ID No: 1385 | | SEQ ID No: 1386 |
| PPP4R2 | 553 | 592521 | protein phosphatase 4, regulatory | | SEQ ID No: 1387 | SEQ ID No: 1388 |
| | | | subunit 2 | | | |
| PDK4 | 554 | 594120 | pyruvate dehydrogenase kinase, | SEQ ID No: 1389 | | SEQ ID No: 1390 |
| | | | isoenzyme 4 | | | |
| | 555 | 594540 | similar to metallothionein-ie (mt-1e) | SEQ ID No: 1391 | | |
| BPHL | 556 | 595600 | biphenyl hydrolase-like (serine | SEQ ID No: 1392 | SEQ ID No: 1393 | SEQ ID No: 1394 |
| | | | hydrolase; breast epithelial mucin- | | | |
| | | | associated antigen) | | | |
| ZNF204 | 557 | 60204 | zinc finger protein 204 | SEQ ID No: 1395 | SEQ ID No: 1396 | |
| HOXA1 | 558 | 611075 | homeo box a1 | SEQ ID No: 1397 | SEQ ID No: 1398 | SEQ ID No: 1399 |
| C22ORF19 | 559 | 611123 | chromosome 22 open reading frame 19 | SEQ ID No: 1400 | SEQ ID No: 1401 | SEQ ID No: 1402 |
| MYF6 | 560 | 611255 | myogenic factor 6 (herculin) | SEQ ID No: 1403 | SEQ ID No: 1404 | SEQ ID No: 1405 |
| KIAA1181 | 561 | 611623 | kiaa1181 protein | SEQ ID No: 1406 | | SEQ ID No: 1407 |
| AMPD1 | 562 | 611660 | adenosine monophosphate deaminase 1 | SEQ ID No: 1408 | | SEQ ID No: 1409 |
| | | | (isoform m) | | | |
| TNNT3 | 563 | 611783 | troponin t3, skeletal, fast | SEQ ID No: 1410 | | SEQ ID No: 1411 |
| NEDD5 | 564 | 611946 | neural precursor cell expressed, | SEQ ID No: 1412 | SEQ ID No: 1413 | SEQ ID No: 1414 |
| | | | developmentally down-regulated 5 | | | |
| HSPA9B | 565 | 612365 | heat shock 70 kda protein 9b (mortalin- | SEQ ID No: 1415 | SEQ ID No: 1416 | SEQ ID No: 664 |
| | | | 2) | | | |
| | 566 | 62429 | | SEQ ID No: 1417 | SEQ ID No: 1418 | |
| | 567 | 624513 | homo sapiens transcribed sequence with | SEQ ID No: 1419 | SEQ ID No: 1420 | |
| | | | strong similarity to protein pir: s29331 | | | |
| | | | (h. sapiens) s29331 glutamate | | | |
| | | | dehydrogenase - human | | | |
| GNB2L1 | 568 | 625541 | guanine nucleotide binding protein (g | SEQ ID No: 1421 | SEQ ID No: 1422 | SEQ ID No: 1312 |
| | | | protein), beta polypeptide 2-like 1 | | | |
| GNB2L1 | 569 | 625574 | guanine nucleotide binding protein (g | SEQ ID No: 1423 | SEQ ID No: 1424 | SEQ ID No: 1312 |
| | | | protein), beta polypeptide 2-like 1 | | | |
| MYL3 | 570 | 628602 | myosin, light polypeptide 3, alkali; | SEQ ID No: 1425 | SEQ ID No: 1426 | SEQ ID No: 1427 |
| | | | ventricular, skeletal, slow | | | |
| COX6B | 571 | 632026 | cytochrome c oxidase subunit vib | SEQ ID No: 1428 | SEQ ID No: 1429 | SEQ ID No: 1430 |
| DNAJD1 | 572 | 664980 | dnaj (hsp40) homolog, subfamily d, | SEQ ID No: 1431 | | SEQ ID No: 1432 |
| | | | member 1 | | | |
| AKR1A1 | 573 | 665117 | aldo-keto reductase family 1, member | SEQ ID No: 1433 | SEQ ID No: 1434 | SEQ ID No: 1435 |
| | | | a1 (aldehyde reductase) | | | |
| MAP2K7 | 574 | 665682 | mitogen-activated protein kinase kinase 7 | SEQ ID No: 1436 | SEQ ID No: 1437 | SEQ ID No: 1438 |
| SLC7A6 | 575 | 665778 | solute carrier family 7 (cationic amino | SEQ ID No: 1439 | SEQ ID No: 1440 | SEQ ID No: 1441 |
| | | | acid transporter, y+ system), member 6 | | | |
| ANXA6 | 576 | 665818 | annexin a6 | SEQ ID No: 1442 | SEQ ID No: 1443 | SEQ ID No: 1444 |
| HIST1H4C | 577 | 667303 | histone 1, h4c | SEQ ID No: 1445 | SEQ ID No: 1446 | SEQ ID No: 1447 |
| | 578 | 66800 | | SEQ ID No: 1448 | | |
| CPSF5 | 579 | 66820 | cleavage and polyadenylation specific | SEQ ID No: 1449 | | SEQ ID No: 1450 |
| | | | factor 5, 25 kda | | | |
| | 580 | 66832 | | SEQ ID No: 1451 | | |
| | 581 | 66836 | | SEQ ID No: 1452 | | |
| GTF2E1 | 582 | 668494 | general transcription factor iie, | SEQ ID No: 1453 | SEQ ID No: 1454 | SEQ ID No: 1455 |
| | | | polypeptide 1, alpha 56 kda | | | |
| | 583 | 66895 | homo sapiens transcribed sequences | SEQ ID No: 1456 | | |
| RPS14 | 584 | 67721 | ribosomal protein s14 | SEQ ID No: 1457 | SEQ ID No: 1458 | SEQ ID No: 1459 |
| KRT23 | 585 | 67740 | keratin 23 (histone deacetylase | SEQ ID No: 1460 | SEQ ID No: 1461 | SEQ ID No: 1462 |
| | | | inducible) | | | |
| | 586 | 67776 | | SEQ ID No: 1463 | | |
| | 587 | 68140 | | SEQ ID No: 1464 | SEQ ID No: 1465 | |
| | 588 | 68141 | | SEQ ID No: 1466 | | |
| FLJ10916 | 589 | 68176 | hypothetical protein flj10916 | SEQ ID No: 1467 | SEQ ID No: 1468 | SEQ ID No: 1469 |
| ERCC4 | 590 | 682268 | excision repair cross-complementing | SEQ ID No: 1470 | SEQ ID No: 1471 | SEQ ID No: 1472 |
| | | | rodent repair deficiency, | | | |
| | | | complementation group 4 | | | |
| | 591 | 68227 | | SEQ ID No: 1473 | SEQ ID No: 1474 | |
| COL5A1 | 592 | 68276 | collagen, type v, alpha 1 | SEQ ID No: 1475 | | SEQ ID No: 1476 |
| MYOM1 | 593 | 68351 | myomesin 1 (skelemin) 185 kda | SEQ ID No: 1477 | | SEQ ID No: 1478 |
| NEK6 | 594 | 69584 | nima (never in mitosis gene a)-related | SEQ ID No: 1479 | | SEQ ID No: 1480 |
| | | | kinase 6 | | | |
| RPS23 | 595 | 70825 | ribosomal protein s23 | SEQ ID No: 1481 | SEQ ID No: 1482 | SEQ ID No: 1483 |
| RPL5 | 596 | 71096 | ribosomal protein 15 | SEQ ID No: 1484 | SEQ ID No: 1485 | SEQ ID No: 1265 |
| HSF1 | 597 | 712675 | heat shock transcription factor 1 | SEQ ID No: 1486 | SEQ ID No: 1487 | SEQ ID No: 1488 |
| FRAP1 | 598 | 713218 | fk506 binding protein 12-rapamycin | SEQ ID No: 1489 | SEQ ID No: 1490 | SEQ ID No: 1491 |
| | | | associated protein 1 | | | |
| MGC27165 | 599 | 713459 | hypothetical protein mgc27165 | SEQ ID No: 1492 | SEQ ID No: 1493 | |
| RPS27 | 600 | 72056 | ribosomal protein s27 | SEQ ID No: 1494 | SEQ ID No: 1495 | SEQ ID No: 1496 |
| | | | (metallopanstimulin 1) | | | |
| RELA | 601 | 723731 | v-rel reticuloendotheliosis viral | SEQ ID No: 1497 | | SEQ ID No: 1498 |
| | | | oncogene homolog a, nuclear factor of | | | |
| | | | kappa light polypeptide gene enhancer | | | |
| | | | in b-cells 3, p65 (avian) | | | |
| RYR3 | 602 | 72497 | ryanodine receptor 3 | SEQ ID No: 1499 | | SEQ ID No: 1500 |
| COL6A1 | 603 | 726342 | collagen, type vi, alpha 1 | SEQ ID No: 1501 | SEQ ID No: 1502 | SEQ ID No: 825 |
| CNN1 | 604 | 726779 | calponin 1, basic, smooth muscle | SEQ ID No: 1503 | | SEQ ID No: 1504 |
| ITIH1 | 605 | 72694 | inter-alpha (globulin) inhibitor, h1 | SEQ ID No: 1505 | | SEQ ID No: 1506 |
| | | | polypeptide | | | |
| PDE1A | 606 | 727792 | phosphodiesterase 1a, calmodulin- | SEQ ID No: 1507 | SEQ ID No: 1508 | SEQ ID No: 1509 |
| | | | dependent | | | |
| SSR2 | 607 | 72789 | signal sequence receptor, beta | SEQ ID No: 1510 | SEQ ID No: 1511 | SEQ ID No: 1512 |
| | | | (translocon-associated protein beta) | | | |
| NFYA | 608 | 730787 | nuclear transcription factor y, alpha | SEQ ID No: 1513 | SEQ ID No: 1514 | SEQ ID No: 1515 |
| RPS7 | 609 | 73590 | ribosomal protein s7 | SEQ ID No: 1516 | SEQ ID No: 1517 | SEQ ID No: 1518 |
| | 610 | 74834 | | SEQ ID No: 1519 | | |
| SVIL | 611 | 754018 | supervillin | SEQ ID No: 1520 | | SEQ ID No: 1521 |
| THPO | 612 | 754034 | thrombopoietin (myeloproliferative | SEQ ID No: 1522 | SEQ ID No: 1523 | SEQ ID No: 1524 |
| | | | leukemia virus oncogene ligand, | | | |
| | | | megakaryocyte growth and | | | |
| | | | development factor) | | | |
| C1ORF29 | 613 | 754479 | chromosome 1 open reading frame 29 | SEQ ID No: 1525 | SEQ ID No: 1526 | SEQ ID No: 1527 |
| IFITM1 | 614 | 755599 | interferon induced transmembrane | SEQ ID No: 1528 | SEQ ID No: 1529 | SEQ ID No: 1530 |
| | | | protein 1 (9-27) | | | |
| RARB | 615 | 755663 | retinoic acid receptor, beta | SEQ ID No: 1531 | SEQ ID No: 1532 | SEQ ID No: 398 |
| BMP6 | 616 | 768168 | bone morphogenetic protein 6 | SEQ ID No: 1533 | SEQ ID No: 1534 | SEQ ID No: 1535 |
| RPS6KB1 | 617 | 773319 | ribosomal protein s6 kinase, 70 kda, | SEQ ID No: 1536 | SEQ ID No: 1537 | SEQ ID No: 1538 |
| | | | polypeptide 1 | | | |
| R30953_1 | 618 | 782601 | hypothetical protein r30953_1 | SEQ ID No: 1539 | SEQ ID No: 1540 | SEQ ID No: 1541 |
| RNF13 | 619 | 785886 | ring finger protein 13 | SEQ ID No: 1542 | SEQ ID No: 1543 | SEQ ID No: 1544 |
| CGI-128 | 620 | 786662 | cgi-128 protein | SEQ ID No: 1545 | SEQ ID No: 1546 | SEQ ID No: 1547 |
| | 621 | 78879 | similar to complement component 3 | SEQ ID No: 1548 | | |
| CDH1 | 622 | 79598 | cadherin 1, type 1, e-cadherin | SEQ ID No: 1549 | SEQ ID No: 1550 | SEQ ID No: 1551 |
| | | | (epithelial) | | | |
| FHL3 | 623 | 796475 | four and a half lim domains 3 | SEQ ID No: 1552 | SEQ ID No: 1553 | SEQ ID No: 1554 |
| | 624 | 79829 | homo sapiens transcribed sequences | SEQ ID No: 1555 | | |
| VAV1 | 625 | 80384 | vav 1 oncogene | SEQ ID No: 1556 | SEQ ID No: 1557 | SEQ ID No: 1558 |
| PPP1R14A | 626 | 809611 | protein phosphatase 1, regulatory | SEQ ID No: 1559 | | SEQ ID No: 1560 |
| | | | (inhibitor) subunit 14a | | | |
| ETV4 | 627 | 809959 | ets variant gene 4 (e1a enhancer | SEQ ID No: 1561 | SEQ ID No: 1562 | SEQ ID No: 1563 |
| | | | binding protein, e1af) | | | |
| S100A2 | 628 | 810813 | s100 calcium binding protein a2 | SEQ ID No: 1564 | SEQ ID No: 1565 | SEQ ID No: 1566 |
| ITGA2 | 629 | 811740 | integrin, alpha 2 (cd49b, alpha 2 | SEQ ID No: 1567 | SEQ ID No: 1568 | SEQ ID No: 1569 |
| | | | subunit of vla-2 receptor) | | | |
| YWHAZ | 630 | 811939 | tyrosine 3-monooxygenase/tryptophan | SEQ ID No: 1570 | SEQ ID No: 1571 | SEQ ID No: 1572 |
| | | | 5-monooxygenase activation protein, | | | |
| | | | zeta polypeptide | | | |
| PCDH7 | 631 | 813384 | bh-protocadherin (brain-heart) | SEQ ID No: 1573 | | SEQ ID No: 1574 |
| | 632 | 813755 | similar to zinc finger protein 7 (zinc | SEQ ID No: 1575 | SEQ ID No: 1576 | |
| | | | finger protein kox4) (zinc finger protein | | | |
| | | | hf. 16) | | | |
| GJB2 | 633 | 823859 | gap junction protein, beta 2, 26 kda | SEQ ID No: 1577 | SEQ ID No: 1578 | SEQ ID No: 1579 |
| | | | (connexin 26) | | | |
| VWF | 634 | 840486 | von willebrand factor | SEQ ID No: 1580 | SEQ ID No: 1581 | SEQ ID No: 1582 |
| NME1 | 635 | 845363 | non-metastatic cells 1, protein (nm23a) | SEQ ID No: 1583 | | SEQ ID No: 288 |
| | | | expressed in | | | |
| EIF3S6 | 636 | 856961 | eukaryotic translation initiation factor 3, | SEQ ID No: 1584 | | SEQ ID No: 1585 |
| | | | subunit 6 48 kda | | | |
| | 637 | 86078 | | SEQ ID No: 1586 | | |
| | 638 | 869440 | | SEQ ID No: 1587 | | |
| RPL30 | 639 | 878681 | ribosomal protein 130 | SEQ ID No: 1588 | | SEQ ID No: 1589 |
| B2M | 640 | 878798 | beta-2-microglobulin | SEQ ID No: 1590 | | SEQ ID No: 813 |
| HMGB2 | 641 | 884365 | high-mobility group box 2 | SEQ ID No: 1591 | | SEQ ID No: 552 |
| LAMR1 | 642 | 884644 | laminin receptor 1 (ribosomal protein | SEQ ID No: 1592 | | SEQ ID No: 987 |
| | | | sa, 67 kda) | | | |
| PRAME | 643 | 897956 | preferentially expressed antigen in | SEQ ID No: 1593 | | SEQ ID No: 1594 |
| | | | melanoma | | | |
| NME2 | 644 | 951066 | non-metastatic cells 2, protein (nm23b) | SEQ ID No: 1595 | | SEQ ID No: 1596 |
| | | | expressed in | | | |

[0022] Table 1 above identifies a library of polynucleotide sequences of SEQ ID NO. 1 to SEQ ID NO. 1556 and arranges them into sets. Table 1 indicates, wherever available, the name of the gene with its gene symbol, its Image Clone and, for each gene, the relevant SEQ ID NOS defining the set. The “3′” and “5′” columns represent ESTs and the “Ref.” column represent mRNAs of the named gene or Image Clone.

[0023] Thus, the nucleotide sequences of the present invention can be defined by the differents sets, but can also be defined by the name of the gene or fragments thereof as recited in Table 1. Each polynucleotide sequence in Table 1 can therefore be considered as a marker of the corresponding gene. Each marker corresponds to a gene in the human genome; i.e., such marker is identifiable as all or a portion of a gene. The term “marker”, as used herein, is thus meant to refer to the complete gene nucleotide sequence or an EST nucleotide sequence derived from that gene (or a subsequence or complement thereof), the expression or level of which changes with certain conditions, disorders or diseases. Where the expression of the gene correlates with a certain condition, disorder or disease, the gene is a marker for that condition, disorder or disease. Any RNA transcribed from a marker gene (e.g., mRNAs), any cDNA or cRNA produced therefrom, and any nucleic acid derived therefrom, such as synthetic nucleic acid having a sequence derived from the gene corresponding to the marker gene, are also encompassed by the present invention.

[0024] Each mRNA sequence in the Ref. column represents one of the various mRNA splice forms of the gene that are known in the art; e.g., splice forms described in publicly available genomic databases. A skilled artisan is able to select, by routine experimentation, one or more appropriate splice form(s) by, e.g., determining those splice forms having a sequence that matches the sequence of the corresponding Image Clone with a predetermined level of homology.

[0025] A disease, disorder, or condition “associated with” an aberrant expression of a nucleic acid refers to a disease, disorder, or condition in a subject which is caused by, contributed to by, or causative of an aberrant level of expression of a nucleic acid.

[0026] By “nucleic acids,” as used herein, is meant polynucleotides, e.g., isolated, such as isolated deoxyribonucleic acid (DNA), and, where appropriate, isolated ribonucleic acid (RNA). The term is also understood to include, as equivalents, analogs of RNA or DNA made from nucleotide analogs, and, as applicable to the embodiment being described, single (sense or antisense) and double-stranded polynucleotides. ESTs, chromosomes or genomic DNA, cDNAs, mRNAs, and rRNAs are representative examples of molecules that can be referred to as nucleic acids. DNA can be obtained from said nucleic acids sample and RNA can be obtained by transcription of said DNA. In addition, mRNA can be isolated from said nucleic acids sample and cDNA can be obtained by reverse transcription of said mRNA.

[0027] The term “subsequence”, as used herein, is meant to refer to any sequence corresponding to a part of said polynucleotide sequence, which would also be suitable to perform the method of analysis according to the invention. A person skilled in the art can choose the position and length of a subsequence of the invention by applying routine experiments. A subsequence can have at least about 80% homology with said polynucleotide sequence; e.g., at least about 85%, at least about 90%, at least about 95%, or at least about 99% homology.

[0028] The term “pool”, as used herein, is meant to refer to a group of nucleic acid sequences comprising one or more sequences, for example about: 2, 3, 4, 5, 6, 7, 8, 9, 10, 15, 20, 25, 30, 35, 40, 45, 50, 55, 60, 65, 70, 75, 80, 85, 90, 95, 100, 110, 120, 130, 140, 150, 160, 170, 180, 190, 200, 210, 220, 230, 240, 250, 260, 270, 280, 290, 300, 350, 400, 450, 500, 550, 600, 650, 700, 750, 800, 850, 900, 950, 1000, 1100, 1200, 1300, 1400, 1500,1600, 1700, 1800, 1900, or 2000 sequences.

[0029] The number of sets may vary in the range of from 1 to the maximum number of sets described therein, e.g., 646 sets, for example about: 2, 3, 4, 5, 6, 7, 8, 9, 10, 15, 20, 25, 30, 35, 40, 45, 50, 55, 60, 65, 70, 75, 80, 85, 90, 95, 100, 110, 120, 130, 140, 150, 160, 170, 180, 190, 200, 210, 220, 230, 240, 250, 260, 270, 280, 290, 300, 350, 400, 450, 500, 550, or 600 sets.

[0030] The over or under expression (or respectively “up regulation” and “down regulation,” which may be used interchangeably with over or under expression, respectively) can be determined by any known method within the skill in the art, such as disclosed in PCT patent application WO 02/103320, the entire disclosure of which is herein incorporated by reference. Such methods can comprise the detection of difference in the expression of the polynucleotide sequences according to the present invention in relation to at least one control. Said control can comprise, for example, polynucleotide sequence(s) from sample of the same patient or from a pool of patients exhibiting histopathologic features of colorectal disease, or selected from among reference sequence(s) which are already known to be over or under expressed. The expression level of said control can be an average or an absolute value of the expression of reference polynucleotide sequences. These values can be processed (e.g., statistically) in order to accentuate the difference relative to the expression of the polynucleotide sequences of the invention.

[0031] The analysis of the over or under expression of polynucleotide sequences can be carried out on sample, such as biological material derived from any mammalian cells, including cell lines, xenografts, and human tissues, preferably from colon tissue. The method according to the invention can be performed on sample from a human subject or an animal (for example for veterinary application or preclinical trial).

[0032] By “over or underexpression” of a polynucleotide sequence, as used herein, is meant that overexpression of certain sequences is detected simultaneously with the underexpression of other sequences. “Simultaneously” means concurrent with or within a biologic or functionally relevant period of time during which the over expression of a sequence can be followed by the under expression of another sequence, or conversely, e.g., because both over and under expression are directly or indirectly correlated.

[0033] In one embodiment, the method according to the present invention is therefore directed to the analysis of differential gene expression associated with colon tumors wherein the pool of polynucleotide sequences corresponds to all or part of the polynucleotide sequences, subsequences or complements thereof, selected from each of predefined polynucleotide sequence sets consisting of sets:

[0034] 1; 4; 9; 10; 11; 13; 15; 16; 17; 18; 21; 27; 28; 30; 31; 34; 37; 39; 41; 43; 45; 46; 52; 53; 58; 59; 60; 65; 68; 69; 70; 75; 76; 78; 79; 80; 84; 85; 87; 88; 90; 95; 96; 98; 99; 101; 105; 108; 110; 111; 113; 114; 116; 119; 120; 122; 124; 125; 126; 127; 130; 131; 138; 139; 140; 141; 143; 150; 152; 153; 155; 159; 164; 171; 175; 176; 178; 181; 182; 184; 185; 189; 192; 196; 197; 198; 203; 205; 207; 208; 210; 213; 214; 215; 216; 218; 221; 223; 225; 227; 231; 235; 241; 243; 251; 256; 259; 261; 262; 263; 264; 266; 267; 268; 270; 279; 281; 286; 287; 288; 291; 298; 299; 301; 307; 310; 312; 313; 317; 319; 329; 331; 332; 337; 338; 339; 340; 341; 342; 344; 346; 352; 354; 357; 360; 361; 366; 368; 369; 377; 379; 381; 384; 385; 386; 390; 392; 394; 395; 397; 398; 400; 401; 405; 406; 409; 410; 413; 423; 427; 434; 436; 437; 438; 440; 442; 443; 444; 445; 448; 454; 459; 463; 464; 467; 469; 470; 488; 492; 495; 500; 503; 507; 508; 516; 518; 520; 522; 524; 538; 543; 547; 549; 552; 555; 557; 561; 567; 568; 569; 573; 574; 583; 586; 588; 592; 596; 597; 598; 599; 600; 601; 604; 609; 610; 611; 614; 616; 617; 621; 626; 627; 629; 630; 631; 632; 634; 635; 636; 638; 641; 642; and 644.

[0035] Said analysis can comprise at least one of the following steps:
[0036] The detection of the overexpression of a pool of polynucleotide sequences in colon tissues, said pool corresponding to all or part of the polynucleotide sequences, subsequences or complements thereof, selected from each of predefined polynucleotide sequences sets consisting of sets:

[0037] 1; 9; 10; 16; 18; 27; 28; 30; 39; 41; 43; 45; 53; 58; 60; 65; 69; 75; 76; 113; 116; 120; 122; 126; 127; 130; 131; 138; 139; 140; 141; 143; 150; 152; 153; 159; 181; 182; 184; 189; 192; 197; 198; 210; 213; 214; 216; 218; 225; 227; 243; 259; 261; 264; 266; 267; 268; 281; 286; 287; 288; 291; 299; 307; 312; 313; 317; 319; 332; 337; 338; 339; 340; 341; 342; 344; 354; 357; 360; 361; 368; 381; 384; 385; 392; 394; 397; 398; 405; 423; 427; 442; 444; 464; 467; 469; 488; 495; 500; 507; 508; 516; 520; 522; 524; 538; 543; 547; 549; 552; 561; 567; 568; 569; 573; 586; 588; 592; 596; 600; 609; 614; 627; 629; 630; 635; 636; 641; 642; and 644.
[0038] The detection of the underexpression of a pool of polynucleotide sequences in colon tissues, said pool corresponding to all or part of the polynucleotide sequences, subsequences or complements thereof, selected from each of predefined polynucleotide sequence sets consisting of sets:

[0039] 4; 11; 13; 15; 17; 21; 31; 34; 37; 46; 52; 59; 68; 70; 78; 79; 80; 84; 85; 87; 88; 90; 95; 96; 98; 99; 101; 105; 108; 110; 111; 114; 119; 124; 125; 155; 164; 171; 175; 176; 178; 185; 196; 203; 205; 207; 208; 215; 221; 223; 231; 235; 241; 251; 256; 262; 263; 270; 279; 298; 301; 310; 329; 331; 346; 352; 366; 369; 377; 379; 386; 390; 395; 400; 401; 406; 409; 410; 413; 434; 436; 437; 438; 440; 443; 445; 448; 454; 459; 463; 470; 492; 503; 518; 555; 557; 574; 583; 597; 598; 599; 601; 604; 610; 611; 616; 617; 621; 626; 631; 632; 634; and 638.

[0040] In a preferred embodiment, the sets for analyzing differential gene expression associated with colon tumors can, for example, consist of those mentioned in Table 2:

TABLE 2

| | Clone | | | | | |
|---|---|---|---|---|---|---|
| | identifier | | Gene | Reference | Title of cluster | |
| Sets | (Image) | Cluster (Unigene) | Symbol | sequences | (Gene name) | SEQ ID Numbers |
| 1 | 1012666 | ughs.82422:175 | capg | nm_001747 | capping protein (actin filament), | SEQ ID NO: 1597 |
| | | | | | gelsolin-like | |
| 4 | 1046837 | ughs.235935:175 | nov | nm_002514 | nephroblastoma overexpressed gene | SEQ ID NO: 1598 |
| 15 | 110486 | ughs.404336:175 | loc92906 | nm_138394 | hypothetical protein bc008217 | SEQ ID NO: 1599 |
| 21 | 117240 | ughs.180398:175 | lpp | nm_005578 | lim domain containing preferred | SEQ ID NO: 1600 |
| | | | | | translocation partner in lipoma | |
| 27 | 119530 | ughs.17287:175 | kcnj15 | nm_002243, | potassium inwardly-rectifying | SEQ ID NO: 1601 |
| | | | | nm_170736, | channel, subfamily j, member 15 | SEQ ID NO: 1602 |
| | | | | nm_170737 | | SEQ ID NO: 1603 |
| 58 | 1338831 | | | | | |
| 68 | 139789 | ughs.79095:175 | eps15 | nm_001981 | epidermal growth factor receptor | SEQ ID NO: 1604 |
| | | | | | pathway substrate 15 | |
| 75 | 1456160 | ughs.531989:175 | azgp1 | nm_001185 | alpha-2-glycoprotein 1, zinc | SEQ ID NO: 1605 |
| 79 | 146922 | | | | | |
| 95 | 153461 | ughs.25511:175 | tgfb1i1 | nm_015927 | transforming growth factor beta 1 | SEQ ID NO: 1606 |
| | | | | | induced transcript 1 | |
| 98 | 153854 | ughs.279604:175 | des | nm_001927 | desmin | SEQ ID NO: 1607 |
| 101 | 154600 | ughs.80776:175 | plcd1 | nm_006225 | phospholipase c, delta 1 | SEQ ID NO: 1608 |
| 114 | 1667886 | ughs.75486:175 | hsf4 | nm_001538 | heat shock transcription factor 4 | SEQ ID NO: 1609 |
| 119 | 1731982 | ughs.271620:175 | plcg2 | nm_002661 | phospholipase c, gamma 2 | SEQ ID NO: 1610 |
| | | | | | (phosphatidylinositol-specific) | |
| 127 | 186331 | ughs.32393:175 | dars | nm_001349 | aspartyl-trna synthetase | SEQ ID NO: 1611 |
| 131 | 1912132 | ughs.250822:175 | stk6 | nm_003600, | serine/threonine kinase 6 | SEQ ID NO: 1612 |
| | | | | nm_198433, | | SEQ ID NO: 1613 |
| | | | | nm_198434, | | SEQ ID NO: 1614 |
| | | | | nm_198435, | | SEQ ID NO: 1615 |
| | | | | nm_198436, | | SEQ ID NO: 1616 |
| | | | | nm_198437 | | SEQ ID NO: 1617 |
| 140 | 195702 | ughs.270920:175 | dap3 | nm_004632, | death associated protein 3 | SEQ ID NO: 1618 |
| | | | | nm_033657 | | SEQ ID NO: 1619 |
| 155 | 2055272 | ughs.252938:175 | lrp2 | nm_004525 | low density lipoprotein-related | SEQ ID NO: 1620 |
| | | | | | protein 2 | |
| 176 | 2349125 | ughs.136713:175 | vpreb3 | nm_013378 | pre-b lymphocyte gene 3 | SEQ ID NO: 1621 |
| 192 | 241788 | ughs.300774:175 | fgb | nm_005141 | fibrinogen, b beta polypeptide | SEQ ID NO: 1622 |
| 241 | 272189 | ughs.260523:175 | nras | nm_002524 | neuroblastoma ras viral (v-ras) | SEQ ID NO: 1623 |
| | | | | | oncogene homolog | |
| 243 | 272502 | ughs.374334:175 | cct4 | nm_006430 | chaperonin containing tcp1, subunit 4 | SEQ ID NO: 1624 |
| | | | | | (delta) | |
| 259 | 285780 | ughs.2936:175 | mmp13 | nm_002427 | matrix metalloproteinase 13 | SEQ ID NO: 1625 |
| | | | | | (collagenase 3) | |
| 263 | 288874 | ughs.37014:175; | ca7; | nm_005182; | carbonic anhydrase vii; zinc finger | SEQ ID NO: 1626 |
| | | ughs.48589:175 | znf228 | nm_013380 | protein 228 | SEQ ID NO: 1627 |
| 270 | 30066 | ughs.89657:175 | ilk | nm_004517 | integrin-linked kinase | SEQ ID NO: 1628 |
| 279 | 306697 | ughs.82508:175 | thap11 | nm_020457 | thap domain containing 11 | SEQ ID NO: 1629 |
| 286 | 310860 | ughs.368481:175 | nudt5 | nm_014142 | nudix (nucleoside diphosphate linked | SEQ ID NO: 1630 |
| | | | | | moiety x)-type motif 5 | |
| 298 | 322452 | ughs.124411:175 | chga | nm_001275 | chromogranin a (parathyroid | SEQ ID NO: 1631 |
| | | | | | secretory protein 1) | |
| 299 | 322471 | ughs.1063:175 | snrpc | nm_003093 | small nuclear ribonucleoprotein | SEQ ID NO: 1632 |
| | | | | | polypeptide c | |
| 307 | 323948 | ughs.2316:175 | sox9 | nm_000346 | sry (sex determining region y)-box 9 | SEQ ID NO: 1633 |
| | | | | | (campomelic dysplasia, autosomal | |
| | | | | | sex-reversal) | |
| 310 | 324369 | ughs.513557:175 | ctbs | nm_004388 | chitobiase, di-n-acetyl- | SEQ ID NO: 1634 |
| 312 | 324757 | ughs.370504:175 | rps15a | nm_001019 | ribosomal protein s15a | SEQ ID NO: 1635 |
| 313 | 324930 | ughs.28491:175 | sat | nm_002970 | spermidine/spermine n1- | SEQ ID NO: 1636 |
| | | | | | acetyltransferase | |
| 317 | 327684 | ughs.148090:175 | cdh15 | nm_004933 | cadherin 15, m-cadherin (myotubule) | SEQ ID NO: 1637 |
| 329 | 342054 | ughs.20136:175 | cxorf6 | nm_005491 | chromosome x open reading frame 6 | SEQ ID NO: 1638 |
| 346 | 34888 | ughs.489521:175; | reln; | nm_005045, | reelin; transcribed locus | SEQ ID NO: 1639 |
| | | ughs.492257:175 | | nm_173054; | | SEQ ID NO: 1640 |
| 357 | 358117 | ughs.2316:175 | sox9 | nm_000346 | sry (sex determining region y)-box 9 | |
| | | | | | (campomelic dysplasia, autosomal | |
| | | | | | sex-reversal) | |
| 360 | 358683 | ughs.133892:175 | tpm1 | nm_000366 | tropomyosin 1 (alpha) | SEQ ID NO: 1641 |
| 361 | 358943 | ughs.438837:175 | n2n | nm_203458 | similar to notch2 protein | SEQ ID NO: 1642 |
| 394 | 383433 | ughs.356261:175 | | | similar to laminin receptor 1 | |
| 395 | 39593 | ughs.12409:175 | sst | nm_001048 | somatostatin | SEQ ID NO: 1643 |
| 398 | 39972 | ughs.432317:175 | adam23 | nm_003812 | a disintegrin and metalloproteinase | SEQ ID NO: 1644 |
| | | | | | domain 23 | |
| 405 | 415389 | ughs.334612:175 | snrpe | nm_003094 | small nuclear ribonucleoprotein | SEQ ID NO: 1645 |
| | | | | | polypeptide e | |
| 406 | 416060 | ughs.440934:175 | arg1 | nm_000045 | arginase, liver | SEQ ID NO: 1646 |
| 413 | 427858 | ughs.508411:175 | gpc6 | nm_005708 | glypican 6 | SEQ ID NO: 1647 |
| 427 | 44152 | ughs.1708:175 | cct3 | nm_005998 | chaperonin containing tcp1, subunit 3 | SEQ ID NO: 1648 |
| | | | | | (gamma) | |
| 436 | 470122 | ughs.93841:175 | kcnmb1 | nm_004137 | potassium large conductance | SEQ ID NO: 1649 |
| | | | | | calcium-activated channel, subfamily | |
| | | | | | m, beta member 1 | |
| 437 | 470175 | ughs.3548:175 | mtcp1 | nm_014221 | mature t-cell proliferation 1 | SEQ ID NO: 1650 |
| 438 | 470279 | ughs.408730:175 | cntnap1 | nm_003632 | contactin associated protein 1 | SEQ ID NO: 1651 |
| 443 | 47986 | ughs.149609:175 | itga5 | nm_002205 | integrin, alpha 5 (fibronectin | SEQ ID NO: 1652 |
| | | | | | receptor, alpha polypeptide) | |
| 454 | 488526 | ughs.78344:175 | myh11 | nm_002474, | myosin, heavy polypeptide 11, | SEQ ID NO: 1653 |
| | | | | nm_022844 | smooth muscle | SEQ ID NO: 1654 |
| 464 | 501939 | ughs.21635:175; | tubg1; | nm_001070; | tubulin, gamma 1; ww domain | SEQ ID NO: 1655 |
| | | ughs.461453:175 | wwox | nm_016373, | containing oxidoreductase | SEQ ID NO: 1656 |
| | | | | nm_018560, | | SEQ ID NO: 1657 |
| | | | | nm_130788, | | SEQ ID NO: 1658 |
| | | | | nm_130790, | | SEQ ID NO: 1659 |
| | | | | nm_130791, | | SEQ ID NO: 1660 |
| | | | | nm_130792, | | SEQ ID NO: 1661 |
| | | | | nm_130844 | | SEQ ID NO: 1662 |
| 507 | 531496 | ughs.292072:175 | eps15l1 | nm_021235 | epidermal growth factor receptor | SEQ ID NO: 1663 |
| | | | | | pathway substrate 15-like 1 | |
| 522 | 546439 | ughs.5662:175 | gnb2l1 | nm_006098 | guanine nucleotide binding protein (g | SEQ ID NO: 1664 |
| | | | | | protein), beta polypeptide 2-like 1 | |
| 547 | 564501 | ughs.434102:175 | hmgb1 | nm_002128 | high-mobility group box 1 | SEQ ID NO: 1665 |
| 552 | 592041 | ughs.93002:175 | ube2c | nm_007019, | ubiquitin-conjugating enzyme e2c | SEQ ID NO: 1666 |
| | | | | nm_181799, | | SEQ ID NO: 1667 |
| | | | | nm_181800, | | SEQ ID NO: 1668 |
| | | | | nm_181801, | | SEQ ID NO: 1669 |
| | | | | nm_181802, | | SEQ ID NO: 1670 |
| | | | | nm_181803 | | SEQ ID NO: 1671 |
| 555 | 594540 | ughs.454253:175 | ptch | nm_000264 | patched homolog (drosophila) | SEQ ID NO: 1672 |
| 568 | 625541 | ughs.5662:175 | gnb2l1 | nm_006098 | guanine nucleotide binding protein (g | |
| | | | | | protein), beta polypeptide 2-like 1 | |
| 569 | 625574 | ughs.5662:175 | gnb2l1 | nm_006098 | guanine nucleotide binding protein (g | |
| | | | | | protein), beta polypeptide 2-like 1 | |
| 614 | 755599 | ughs.458414:175 | ifitm1 | nm_003641 | interferon induced transmembrane | SEQ ID NO: 1673 |
| | | | | | protein 1 (9-27) | |
| 631 | 813384 | ughs.443020:175 | pcdh7 | nm_002589, | bh-protocadherin (brain-heart) | SEQ ID NO: 1674 |
| | | | | nm_032456, | | SEQ ID NO: 1675 |
| | | | | nm_032457 | | SEQ ID NO: 1676 |
| 634 | 840486 | ughs.440848:175 | vwf | nm_000552 | von willebrand factor | SEQ ID NO: 1677 |
| 636 | 856961 | ughs.405590:175 | eif3s6 | nm_001568 | eukaryotic translation initiation | SEQ ID NO: 1678 |
| | | | | | factor 3, subunit 6 48 kda | |
| 641 | 884365 | ughs.434953:175 | hmgb2 | nm_002129 | high-mobility group box 2 | SEQ ID NO: 1679 |
| 644 | 951066 | ughs.433416:175 | nme2 | nm_002512 | non-metastatic cells 2, protein | SEQ ID NO: 1680 |
| | | | | | (nm23b) expressed in | |

[0041] In another embodiment, the method according to the present invention is directed to the analysis of differential gene expression associated with secondary metastatic events in patients with colorectal tumors, in particular visceral metastasis or lymph node metastasis. In the visceral metastasis embodiment, said analysis comprises the detection of the overexpression or the underexpression of a pool of polynucleotide sequences in colon tissues, said pool corresponding to all or part of the polynucleotide sequences, subsequences or complements thereof, selected from each of predefined polynucleotide sequence sets consisting of sets:

[0042] 2; 3; 10; 22; 24; 25; 30; 32; 33; 35; 36; 39; 40; 41; 42; 47; 50; 54; 57; 67; 72; 86; 97; 102; 103; 104; 107; 117; 118; 120; 128; 130; 132; 133; 134; 137; 144; 145; 146; 147; 149; 153; 156; 158; 162; 163; 165; 169; 170; 173; 174; 179; 180; 188; 191; 193; 194; 195; 199; 200; 201; 202; 204; 206; 209; 210; 211; 212; 213; 214; 216; 217; 219; 222; 234; 238; 246; 248; 249; 250; 255; 271; 272; 273; 276; 277; 278; 282; 283; 284; 291; 292; 293; 294; 295; 296; 303; 304; 305; 306; 308; 312; 314; 318; 323; 324; 325; 326; 330; 336; 337; 338; 339; 340; 341; 342; 343; 344; 347; 349; 350; 351; 353; 356; 359; 360; 361; 362; 363; 364; 371; 372; 374; 378; 380; 381; 382; 383; 384; 387; 388; 393; 396; 397; 399; 402; 403; 408; 414; 415; 417; 418; 419; 420; 421; 422; 426; 428; 430; 432; 433; 441; 446; 449; 457; 458; 460; 465; 471; 472; 473; 475; 476; 478; 480; 481; 482; 484; 485; 486; 490; 493; 494; 497; 501; 502; 504; 505; 509; 510; 514; 516; 520; 525; 526; 527; 528; 529; 530; 537; 538; 539; 541; 545; 546; 550; 558; 559; 560; 561; 562; 564; 565; 566; 571; 576; 577; 578; 580; 581; 584; 585; 586; 590; 591; 593; 594; 595; 596; 602; 607; 609; 612; 613; 615; 623; 624; 625; 633; 635; 639; 640; 643; and 644.

[0043] The analysis can comprise at least one of the following steps:
[0044] The detection of the overexpression of a pool of polynucleotide sequences in colon tissues, said pool corresponding to all or part of the polynucleotide sequences, subsequences or complement thereof selected from each of predefined polynucleotide sequence sets consisting of sets:

[0045] 36; 86; 104; 107; 117; 132; 144; 153; 156; 174; 191; 209; 248; 349; 350; 396; 417; 419; 432; 558; 566; 613; 623; 625; 633; and 643.
[0046] The detection of the underexpression of a pool of polynucleotide sequences in colon tissues, said pool corresponding to all or part of the polynucleotide sequences, subsequences or complements thereof, selected in each of predefined polynucleotide sequence sets consisting of sets:

[0047] 2; 3; 10; 22; 24; 25; 30; 32; 33; 35; 39; 40; 41; 42; 47; 50; 54; 57; 67; 72; 97; 102; 103; 118; 120; 128; 130; 133; 134; 137; 145; 146; 147; 149; 158; 162; 163; 165; 169; 170; 173; 179; 180; 188; 193; 194; 195; 199; 200; 201; 202; 204; 206; 210; 211; 212; 213; 214; 216; 217; 219; 222; 234; 238; 246; 249; 250; 255; 271; 272; 273; 276; 277; 278; 282; 283; 284; 291; 292; 293; 294; 295; 296; 303; 304; 305; 306; 308; 312; 314; 318; 323; 324; 325; 326; 330; 336; 337; 338; 339; 340; 341; 342; 343; 344; 347; 351; 353; 356; 359; 360; 361; 362; 363; 364; 371; 372; 374; 378; 380; 381; 382; 383; 384; 387; 388; 393; 397; 399; 402; 403; 408; 414; 415; 418; 420; 421; 422; 426; 428; 430; 433; 441; 446; 449; 457; 458; 460; 465; 471; 472; 473; 475; 476; 478; 480; 481; 482; 484; 485; 486; 490; 493; 494; 497; 501; 502; 504; 505; 509; 510; 514; 516; 520; 525; 526; 527; 528; 529; 530; 537; 538; 539; 541; 545; 546; 550; 559; 560; 561; 562; 564; 565; 571; 576; 577; 578; 580; 581; 584; 585; 586; 590; 591; 593; 594; 595; 596; 602; 607; 609; 612; 615; 624; 635; 639; 640; and 644.

[0048] In a preferred embodiment, the sets for analyzing differential gene expression associated with visceral metastasis can, for example, consist of those mentioned in Table 3:

TABLE 3

| | Clone | | Gene | Reference | | |
|---|---|---|---|---|---|---|
| Set | identifier | cluster | Symbol | sequences | Title of cluster | SEQ ID Numbers |
| 32 | image: 121076 | ughs.107476:175; | atp5l; | nm_006476; | atp synthase, h+ transporting, | SEQ ID NO: 1681 |
| | | ughs.75275:175 | ube4a | nm_004788 | mitochondrial f0 complex, subunit g; | SEQ ID NO: 1682 |
| | | | | | ubiquitination factor e4a (ufd2 | |
| | | | | | homolog, yeast) | |
| 33 | image: 121265 | ughs.181315:175 | Ifnar1 | nm_000629 | interferon (alpha, beta and omega) | SEQ ID NO: 1683 |
| | | | | | receptor 1 | |
| 50 | image: 129146 | ughs.423404:175 | cox7a2l | nm_004718 | cytochrome c oxidase subunit viia | SEQ ID NO: 1684 |
| | | | | | polypeptide 2 like | |
| 133 | image: 191714 | ughs.370504:175; | rps15a; | nm_001019; | ribosomal protein s15a; transcribed | |
| | | ughs.486908:175 | | | locus, moderately similar to | |
| | | | | | xp_212877.2 ribosomal protein s15a | |
| | | | | | [rattus norvegicus] | |
| 188 | image: 240753 | | | | | |
| 217 | image: 258313 | ughs.432170:175 | cox7b | nm_001866 | cytochrome c oxidase subunit viib | SEQ ID NO: 1685 |
| 271 | image: 301119 | ughs.80691:175 | ckmt2 | nm_001825 | creatine kinase, mitochondrial 2 | SEQ ID NO: 1686 |
| | | | | | (sarcomeric) | |
| 284 | image: 31027 | ughs.180414:175; | hspa8; | nm_006597, | heat shock 70 kda protein 8; fragile x | SEQ ID NO: 1687 |
| | | ughs.52788:175 | fxr2 | nm_153201; | mental retardation, autosomal | SEQ ID NO: 1688 |
| | | | | nm_004860 | homolog 2 | SEQ ID NO: 1689 |
| 296 | image: 321973 | ughs.108957:175 | rps27l | nm_015920 | ribosomal protein s27-like | SEQ ID NO: 1690 |
| 303 | image: 323681 | ughs.11156:175 | loc51255 | nm_016494 | hypothetical protein loc51255 | SEQ ID NO: 1691 |
| 312 | image: 324757 | ughs.370504:175 | rps15a | nm_001019 | ribosomal protein s15a | |
| 323 | image: 33794 | ughs.155433:175 | atp5c1 | nm_001001973, | atp synthase, h+ transporting, | SEQ ID NO: 1692 |
| | | | | nm_005174 | mitochondrial f1 complex, gamma | SEQ ID NO: 1693 |
| | | | | | polypeptide 1 | |
| 340 | image: 345694 | ughs.156316:175 | Dcn | nm_001920, | decorin | SEQ ID NO: 1694 |
| | | | | nm_133503, | | SEQ ID NO: 1695 |
| | | | | nm_133504, | | SEQ ID NO: 1696 |
| | | | | nm_133505, | | SEQ ID NO: 1697 |
| | | | | nm_133506, | | SEQ ID NO: 1698 |
| | | | | nm_133507 | | SEQ ID NO: 1699 |
| 343 | image: 346269 | ughs.420269:175 | col6a2 | nm_001849, | collagen, type vi, alpha 2 | SEQ ID NO: 1700 |
| | | | | nm_058174, | | SEQ ID NO: 1701 |
| | | | | nm_058175 | | SEQ ID NO: 1702 |
| 361 | image: 358943 | ughs.438837:175 | n2n | nm_203458 | similar to notch2 protein | SEQ ID NO: 1703 |
| 403 | image: 41411 | ughs.184582:175; | rpl24; | nm_000986; | ribosomal protein l24; transcribed | SEQ ID NO: 1704 |
| | | ughs.206520:175 | | | locus | |
| 408 | image: 416946 | ughs.395309:175 | Txn | nm_003329 | thioredoxin | SEQ ID NO: 1705 |
| 473 | image: 509588 | ughs.421646:175 | taf12 | nm_005644 | taf12 rna polymerase ii, tata box | SEQ ID NO: 1706 |
| | | | | | binding protein (tbp)-associated | |
| | | | | | factor, 20 kda | |
| 484 | image: 510977 | ughs.173724:175 | Ckb | nm_001823 | creatine kinase, brain | SEQ ID NO: 1707 |
| 494 | image: 526038 | ughs.536668:175 | | | transcribed locus | |
| 502 | image: 530368 | ughs.469653:175 | rpl5 | nm_000969 | ribosomal protein l5 | SEQ ID NO: 1708 |
| 516 | image: 544885 | ughs.469653:175 | rpl5 | nm_000969 | ribosomal protein l5 | SEQ ID NO: 1708 |
| 624 | image: 79829 | ughs.7888:175 | erbb4 | nm_005235 | v-erb-a erythroblastic leukemia viral | SEQ ID NO: 1709 |
| | | | | | oncogene homolog 4 (avian) | |

[0049] According to the lymph node metastasis embodiment, said analysis comprises the detection of the overexpression or the underexpression of a pool of polynucleotide sequences in colon tissues, said pool corresponding to all or part of the polynucleotide sequences, subsequences or complements thereof, selected from each of predefined polynucleotide sequence sets consisting of sets:

[0050] 38; 55; 66; 91; 93; 102; 103; 133; 142; 144; 153; 163; 190; 210; 232; 254; 280; 296; 300; 304; 311; 321; 335; 378; 383; 384; 420; 425; 429; 432; 468; 473; 487; 516; 519; 544; 553; 573; 577; 578; 585; 587; 589; 592; 605; 608; and 644; preferably from sets 142; 144; 153; 190; 280; 468; 519; 553; and 589.

[0051] The analysis can comprise at least one of the following steps:
[0052] The detection of the overexpression of a pool of polynucleotide sequences in colon tissues, said pool corresponding to all or part of the polynucleotide sequences, subsequences or complements thereof selected from each of predefined polynucleotide sequence sets consisting of sets:

[0053] 55; 66; 144; 153; 432; 553; and 608; preferably 144; 153; and 553.
[0054] The detection of the underexpression of a pool of polynucleotide sequences in colon tissues, said pool corresponding to all or part of the polynucleotide sequences, subsequences or complements thereof, selected from each of predefined polynucleotide sequence sets consisting of sets:

[0055] 38; 91; 93; 102; 103; 133; 142; 163; 190; 210; 232; 254; 280; 296; 300; 304; 311; 321; 335; 378; 383; 384; 420; 425; 429; 468; 473; 487; 516; 519; 544; 573; 577; 578; 585; 587; 589; 592; 605; and 644, preferably 142; 190; 280; 468; 519; and 589.

[0056] In a further preferred embodiment, the sets for analyzing differential gene expression associated with lymph node metastasis can, for example, consist of those mentioned in Table 4:

TABLE 4

| | Clone | | Gene | Reference | | |
|---|---|---|---|---|---|---|
| Set | identifier | Cluster | Symbol | sequences | Title of cluster | SEQ ID Numbers |
| 142 | Image: 198903 | ughs.418533:175 | bub3 | nm_004725 | bub3 budding uninhibited by | SEQ ID NO: 1710 |
| | | | | | benzimidazoles 3 homolog (yeast) | |
| 144 | Image: 200521 | ughs.442936:175 | oas1 | nm_002534, | 2′,5′-oligoadenylate synthetase 1, | SEQ ID NO: 1711 |
| | | | | nm_016816 | 40/46 kda | SEQ ID NO: 1712 |
| 153 | Image: 2048801 | ughs.439109:175 | ntrk2 | nm_006180 | neurotrophic tyrosine kinase, | SEQ ID NO: 1713 |
| | | | | | receptor, type 2 | |
| 190 | Image: 241151 | ughs.432424:175 | tpp2 | nm_003291 | tripeptidyl peptidase ii | SEQ ID NO: 1714 |
| 280 | Image: 307094 | ughs.54609:175 | gcat | nm_014291 | glycine c-acetyltransferase (2-amino- | SEQ ID NO: 1715 |
| | | | | | 3-ketobutyrate coenzyme a ligase) | |
| 468 | Image: 504811 | ughs.20082:175 | znf38 | nm_017715, | zinc finger protein 38 | SEQ ID NO: 1716 |
| | | | | nm_145914 | | SEQ ID NO: 1717 |
| 553 | Image: 592521 | ughs.446590:175; | ppp4r2; | nm_174907; | protein phosphatase 4, regulatory | SEQ ID NO: 1718 |
| | | ughs.534524:175 | flj10213 | nm_018029 | subunit 2; hypothetical protein | SEQ ID NO: 1719 |
| | | | | | flj10213 | |
| 589 | Image: 68176 | ughs.179203:175 | flj10916 | nm_018271 | hypothetical protein flj10916 | SEQ ID NO: 1720 |

[0057] In a further embodiment, the method of the present invention is directed to the analysis of differential gene expression associated with MSI phenotype in colon cancer. In this embodiment, said analysis comprises the detection of the overexpression or the underexpression of a pool of polynucleotide sequences in colon tissues, said pool corresponding to all or part of the polynucleotide sequences subsequences or complements thereof, selected from each of predefined polynucleotide sequence sets consisting of sets:

[0058] 29; 48; 56; 62; 71; 77; 82; 109; 112; 135; 136; 154; 157; 166; 167; 186; 220; 226; 236; 237; 239; 240; 242; 244; 253; 260; 277; 290; 297; 348; 358; 375; 376; 404; 407; 412; 416; 424; 431; 450; 451; 452; 462; 474; 477; 479; 486; 498; 511; 521; 533; 534; 535; 542; 572; 619; and 622.

[0059] The analysis can comprise at least one of the following steps:
[0060] The detection of the overexpression of a pool of polynucleotide sequences in colon tissues, said pool corresponding to all or part of the polynucleotide sequences, subsequences or complements thereof selected from each of predefined polynucleotide sequence sets consisting of sets:

[0061] 48; 56; 62; 157; 186; 220; 226; 253; 260; 376; 450; 452; 462; 498; and 511.
[0062] The detection of the underexpression of a pool of polynucleotide sequences in colon tissues, said pool corresponding to all or part of the polynucleotide sequences, subsequences or complements thereof, selected from each of predefined polynucleotide sequence sets consisting of sets:

[0063] 29; 71; 77; 82; 109; 112; 135; 136; 154; 166; 167; 236; 237; 239; 240; 242; 244; 277; 290; 297; 348; 358; 375; 404; 407; 412; 416; 424; 431; 451; 474; 477; 479; 486; 521; 533; 534; 535; 542; 572; 619; and 622.

[0064] In a preferred embodiment, the sets for analyzing differential gene expression associated with MSI phenotype can, for example, consist of those mentioned in Table 5:

TABLE 5

| | Clone | | Gene | Reference | | |
|---|---|---|---|---|---|---|
| Set | identifier | Cluster | Symbol | sequences | Title of cluster | SEQ ID Numbers |
| 29 | Image: 120009 | Ughs.77578:175 | usp9x | nm_004652, | ubiquitin specific protease 9, x- | SEQ ID NO: 1721 |
| | | | | nm_021906 | linked (fat facets-like, drosophila) | SEQ ID NO: 1722 |
| 62 | image: 136361 | Ughs.519034:175; | tnfsf13 | nm_003808, | transcribed locus; tumor necrosis | SEQ ID NO: 1723 |
| | | ughs.54673:175 | | nm_003809, | factor (ligand) superfamily, member | SEQ ID NO: 1724 |
| | | | | nm_153012, | 12 | SEQ ID NO: 1725 |
| | | | | nm_172087, | | SEQ ID NO: 1726 |
| | | | | nm_172088, | | SEQ ID NO: 1727 |
| | | | | nm_172089 | | SEQ ID NO: 1728 |
| 71 | image: 143519 | Ughs.227729:175 | fkbp2 | nm_004470, | fk506 binding protein 2, 13 kda | SEQ ID NO: 1729 |
| | | | | nm_057092 | | SEQ ID NO: 1730 |
| 109 | image: 159885 | Ughs.298469:175 | ace | nm_000789, | angiotensin i converting enzyme | SEQ ID NO: 1731 |
| | | | | nm_152830, | (peptidyl-dipeptidase a) 1 | SEQ ID NO: 1732 |
| | | | | nm_152831 | | SEQ ID NO: 1733 |
| 136 | image: 192581 | Ughs.437040:175 | ptpn21 | nm_007039 | protein tyrosine phosphatase, non- | SEQ ID NO: 1734 |
| | | | | | receptor type 21 | |
| 154 | image: 205314 | Ughs.408312:175 | tp53 | nm_000546 | tumor protein p53 (li-fraumeni | SEQ ID NO: 1735 |
| | | | | | syndrome) | |
| 348 | image: 35072 | Ughs.76152:175 | aqp1 | nm_000385, | aquaporin 1 (channel-forming | SEQ ID NO: 1736 |
| | | | | nm_198098 | integral protein, 28 kda) | SEQ ID NO: 1737 |
| 404 | image: 41452 | Ughs.28491:175 | sat | nm_002970 | spermidine/spermine n1- | SEQ ID NO: 1636 |
| | | | | | acetyltransferase | |
| 412 | image: 42214 | Ughs.192182:175 | syk | nm_003177 | spleen tyrosine kinase | SEQ ID NO: 1738 |
| 416 | image: 430090 | Ughs.355307:175 | tnfrsf7 | nm_001242 | tumor necrosis factor receptor | SEQ ID NO: 1739 |
| | | | | | superfamily, member 7 | |
| 431 | image: 45831 | Ughs.279920:175 | ywhab | nm_003404, | tyrosine 3- | SEQ ID NO: 1740 |
| | | | | nm_139323 | monooxygenase/tryptophan 5- | SEQ ID NO: 1741 |
| | | | | | monooxygenase activation protein, | |
| | | | | | beta polypeptide | |
| 451 | image: 488316 | Ughs.368256:175 | ltbp1 | nm_000627, | latent transforming growth factor | SEQ ID NO: 1742 |
| | | | | nm_206943 | beta binding protein 1 | SEQ ID NO: 1743 |
| 479 | image: 510161 | Ughs.1600:175 | cct5 | nm_012073 | chaperonin containing tcp1, subunit 5 | SEQ ID NO: 1744 |
| | | | | | (epsilon) | |
| 486 | image: 512000 | Ughs.411826:175 | ube2d3 | nm_003340, | ubiquitin-conjugating enzyme e2d 3 | SEQ ID NO: 1745 |
| | | | | nm_181886, | (ubc4/5 homolog, yeast) | SEQ ID NO: 1746 |
| | | | | nm_181887, | | SEQ ID NO: 1747 |
| | | | | nm_181888, | | SEQ ID NO: 1748 |
| | | | | nm_181889, | | SEQ ID NO: 1749 |
| | | | | nm_181890, | | SEQ ID NO: 1750 |
| | | | | nm_181891, | | SEQ ID NO: 1751 |
| | | | | nm_181892, | | SEQ ID NO: 1752 |
| | | | | nm_181893 | | SEQ ID NO: 1753 |
| 498 | image: 530034 | Ughs.544630:175 | | | transcribed locus | |
| 535 | image: 549173 | Ughs.192023:175 | eif3s2 | nm_003757 | eukaryotic translation initiation | SEQ ID NO: 1754 |
| | | | | | factor 3, subunit 2 beta, 36 kda | |
| 622 | image: 79598 | Ughs.194657:175 | cdh1 | nm_004360 | cadherin 1, type 1, e-cadherin | SEQ ID NO: 1755 |
| | | | | | (epithelial) | |

[0065] In a further preferred embodiment, the sets for analyzing differential gene expression associated with MSI phenotype can, for example, consist of those mentioned in Table 6:

TABLE 6

| | | | Gene | Reference | | |
|---|---|---|---|---|---|---|
| Set | Clone identifier | Cluster | Symbol | sequences | Title of cluster | SEQ ID Numbers |
| 109 | image: 159885 | ughs.298469:175 | Ace | nm_000789, | angiotensin i converting enzyme | SEQ ID NO: 1731 |
| | | | | nm_152830 | (peptidyl-dipeptidase a) 1 | SEQ ID NO: 1732 |
| | | | | nm_152831 | | SEQ ID NO: 1733 |
| 154 | image: 205314 | ughs.408312:175 | tp53 | Nm_000546 | tumor protein p53 (li-fraumeni | SEQ ID NO: 1735 |
| | | | | | syndrome) | |
| 412 | image: 42214 | ughs.192182:175 | Syk | Nm_003177 | spleen tyrosine kinase | SEQ ID NO: 1738 |
| 486 | image: 512000 | ughs.411826:175 | ube2d3 | nm_003340, | ubiquitin-conjugating enzyme e2d 3 | SEQ ID NO: 1745 |
| | | | | nm_181886 | (ubc4/5 homolog, yeast) | SEQ ID NO: 1746 |
| | | | | nm_181887 | | SEQ ID NO: 1747 |
| | | | | nm_181888 | | SEQ ID NO: 1748 |
| | | | | nm_181889 | | SEQ ID NO: 1749 |
| | | | | nm_181890 | | SEQ ID NO: 1750 |
| | | | | nm_181891 | | SEQ ID NO: 1751 |
| | | | | nm_181892 | | SEQ ID NO: 1752 |
| | | | | nm_181893 | | SEQ ID NO: 1753 |
| 535 | image: 549173 | ughs.192023:175 | eif3s2 | Nm_003757 | eukaryotic translation initiation | SEQ ID NO: 1754 |
| | | | | | factor 3, subunit 2 beta, 36 kda | |
| 622 | image: 79598 | ughs.194657:175 | cdh1 | Nm_004360 | cadherin 1, type 1, e-cadherin | SEQ ID NO: 1755 |
| | | | | | (epithelial) | |

[0066] In a further embodiment, the method of the present invention is directed to the analysis of differential gene expression associated with survival and death of patients in colon cancer. In this embodiment, said analysis comprises the detection of the overexpression or the underexpression of a pool of polynucleotide sequences in colon tissues, said pool corresponding to all or part of the polynucleotide sequences, subsequences or complements thereof, selected from each of predefined polynucleotide sequences sets consisting of sets:

[0067] 2; 3; 5; 7; 8; 10; 12; 14; 20; 22; 23; 26; 28; 32; 33; 35; 36; 41; 42; 44; 47; 50; 51; 60; 61; 63; 64; 70; 73; 74; 81; 92; 93; 95; 106; 115; 118; 120; 121; 123; 129; 130; 132; 133; 137; 145; 148; 149; 160; 161; 162; 163; 183; 187; 188; 195; 199; 200; 202; 206; 209; 211; 213; 214; 217; 219; 222; 228; 229; 230; 233; 234; 238; 245; 246; 247; 250; 257; 269; 271; 274; 275; 276; 282; 283; 284; 285; 289; 291; 292; 296; 302; 303; 304; 312; 314; 318; 323; 327; 333; 334; 335; 336; 337; 339; 340; 341; 342; 344; 345; 347; 350; 351; 356; 359; 361; 362; 363; 364; 367; 370; 373; 374; 378; 380; 381; 382; 383; 384; 387; 389; 402; 403; 408; 411; 414; 418; 420; 428; 430; 433; 435; 439; 444; 446; 447; 449; 456; 457; 458; 460; 461; 465; 473; 478; 482; 484; 489; 490; 491; 494; 497; 501; 502; 504; 510; 514; 516; 520; 523; 528; 529; 530; 536; 537; 538; 539; 540; 548; 551; 556; 561; 562; 570; 571; 580; 581; 582; 584; 586; 590; 591; 593; 594; 596; 603; 607; 609; 612; 615; 620; 624; 625; 628; 635; 639; and 640.

[0068] The analysis can comprise at least one of the following steps:
[0069] The detection of the overexpression of a pool of polynucleotide sequences in colon tissues, said pool corresponding to all or part of the polynucleotide sequences, subsequences or complements thereof selected from each of predefined polynucleotide sequence sets consisting of sets:

[0070] 5; 14; 36; 44; 61; 64; 70; 81; 95; 115; 121; 132; 183; 209; 228; 275; 333; 334; 350; 367; 373; 435; 439; 523; 570; 603; and 625.
[0071] The detection of the underexpression of a pool of polynucleotide sequences in colon tissues, said pool corresponding to all or part of the polynucleotide sequences, subsequences or complements thereof, selected from each of predefined polynucleotide sequence sets consisting of sets:

[0072] 2; 3; 7; 8; 10; 12; 20; 22; 23; 26; 28; 32; 33; 35; 41; 42; 47; 50; 51; 60; 63; 73; 74; 92; 93; 106; 118; 120; 123; 129; 130; 133; 137; 145; 148; 149; 160; 161; 162; 163; 187; 188; 195; 199; 200; 202; 206; 211; 213; 214; 217; 219; 222; 229; 230; 233; 234; 238; 245; 246; 247; 250; 257; 269; 271; 274; 276; 282; 283; 284; 285; 289; 291; 292; 296; 302; 303; 304; 312; 314; 318; 323; 327; 335; 336; 337; 339; 340; 341; 342; 344; 345; 347; 351; 356; 359; 361; 362; 363; 364; 370; 374; 378; 380; 381; 382; 383; 384; 387; 389; 402; 403; 408; 411; 414; 418; 420; 428; 430; 433; 444; 446; 447; 449; 456; 457; 458; 460; 461; 465; 473; 478; 482; 484; 489; 490; 491; 494; 497; 501; 502; 504; 510; 514; 516; 520; 528; 529; 530; 536; 537; 538; 539; 540; 548; 551; 556; 561; 562; 571; 580; 581; 582; 584; 586; 590; 591; 593; 594; 596; 607; 609; 612; 615; 620; 624; 628; 635; 639; and 640.

[0073] In a preferred embodiment the sets for analyzing differential gene expression associated with the survival and death of patients may for example consist of those mentioned in Table 7:

TABLE 7

| | | | Gene | Reference | | |
|---|---|---|---|---|---|---|
| Set | Clone identifier | cluster | Symbol | sequences | Title of cluster | SEQ ID Numbers |
| 10 | image: 108370 | ughs.366546:175 | map2k2 | nm_030662 | mitogen-activated protein kinase | SEQ ID NO: 1756 |
| | | | | | kinase 2 | |
| 12 | image: 108399 | | | | | |
| 33 | image: 121265 | ughs.181315:175 | ifnar1 | nm_000629 | interferon (alpha, beta and omega) | SEQ ID NO: 1683 |
| | | | | | receptor 1 | |
| 214 | image: 257445 | ughs.77917:175 | uchl3 | nm_006002 | ubiquitin carboxyl-terminal esterase | SEQ ID NO: 1757 |
| | | | | | 13 (ubiquitin thiolesterase) | |
| 217 | image: 258313 | ughs.432170:175 | cox7b | nm_001866 | cytochrome c oxidase subunit viib | SEQ ID NO: 1685 |
| 271 | image: 301119 | ughs.80691:175 | ckmt2 | nm_001825 | creatine kinase, mitochondrial 2 | |
| | | | | | (sarcomeric) | |
| 344 | image: 346610 | ughs.184510:175 | sfn | nm_006142 | stratifin | SEQ ID NO: 1758 |
| 383 | image: 37630 | ughs.300701:175 | mgc8685 | nm_178012 | tubulin, beta polypeptide paralog | SEQ ID NO: 1759 |
| 387 | image: 376755 | ughs.24341:175 | taz | nm_015472 | transcriptional co-activator with pdz- | SEQ ID NO: 1760 |
| | | | | | binding motif (taz) | |
| 414 | image: 428103 | ughs.1311:175 | Cd1c | nm_001765 | cd1c antigen, c polypeptide | SEQ ID NO: 1761 |
| 473 | image: 509588 | ughs.421646:175 | taf12 | nm_005644 | taf12 rna polymerase ii, tata box | SEQ ID NO: 1706 |
| | | | | | binding protein (tbp)-associated | |
| | | | | | factor, 20 kda | |
| 484 | image: 510977 | ughs.173724:175 | ckb | nm_001823 | creatine kinase, brain | SEQ ID NO: 1707 |
| 516 | image: 544885 | ughs.469653:175 | rp15 | nm_000969 | ribosomal protein 15 | SEQ ID NO: 1708 |
| 536 | image: 549178 | ughs.448580:175; | sec611; | nm_007277; | sec6-like 1 (s. cerevisiae); tyrosine 3- | SEQ ID NO: 1762 |
| | | ughs.74405:175 | ywhaq | nm_006826 | monooxygenase/tryptophan 5- | SEQ ID NO: 1763 |
| | | | | | monooxygenase activation protein, | |
| | | | | | theta polypeptide | |
| 561 | image: 611623 | ughs.124979:175; | dj159a19.3; | nm_020462; | hypothetical protein dj159a19.3; | SEQ ID NO: 1764 |
| | | ughs.519765:175 | kiaa1181 | | kiaa1181 protein | |

[0074] In a further embodiment the method of the present invention is directed to the analysis or differential gene expression associated with the location of primary colorectal carcinoma in colon cancer. In this embodiment, said analysis comprises the detection of the overexpression or the underexpression of a pool of polynucleotide sequences in colon tissues, said pool corresponding to all or part of the polynucleotide sequences, subsequences or complements thereof, selected in from of predefined polynucleotide sequence sets consisting of sets:

[0075] 6; 19; 43; 49; 83; 89; 94; 100; 151; 168; 172; 177; 224; 252; 258; 265; 309; 315; 316; 320; 322; 328; 355; 365; 391; 443; 453; 455; 466; 483; 496; 499; 506; 512; 513; 515; 517; 531; 532; 554; 563; 575; 579; 606; 618; and 637.

[0076] The analysis can comprise at least one of the following steps:
[0077] The detection of the overexpression of a pool of polynucleotide sequences in left-colon tissues, said pool corresponding to all or part of the polynucleotide sequences, subsequences or complements thereof selected from each of predefined polynucleotide sequence sets consisting of sets:

[0078] 19; 43; 89; 94; 100; 168; 224; 309; 328; 355; 391; 466; 531; 532; 563; and 637.
[0079] The detection of the overexpression of a pool of polynucleotide sequences in right-colon tissues, said pool corresponding to all or part of the polynucleotide sequences, subsequences or complements thereof, selected from each of predefined polynucleotide sequence sets consisting of sets:

[0080] 6; 49; 83; 151; 172; 177; 252; 258; 265; 315; 316; 320; 322; 365; 443; 453; 455; 483; 496; 499; 506; 512; 513; 515; 517; 554; 575; 579; 606; and 618.

[0081] In a preferred embodiment, the sets for analyzing differential gene expression associated with the location of the primary colorectal carcinoma can, for example, consist of those mentioned in Table 8:

TABLE 8

| | | | Gene | Reference | | |
|---|---|---|---|---|---|---|
| Set | Clone identifier | cluster | Symbol | sequences | Title of cluster | SEQ ID Numbers |
| 43 | image: 124345 | ughs.77204:175 | cenpf | nm_016343 | centromere protein f, 350/400 ka | SEQ ID NO: 1765 |
| | | | | | (mitosin) | |
| 100 | image: 154335 | ughs.321234:175 | exosc10 | nm_001001998, | exosome component 10 | SEQ ID NO: 1766 |
| | | | | nm_002685 | | SEQ ID NO: 1767 |
| 151 | image: 204653 | ughs.174142:175 | csf1r | nm_005211 | colony stimulating factor 1 receptor, | SEQ ID NO: 1768 |
| | | | | | formerly mcdonough feline sarcoma | |
| | | | | | viral (v-fms) oncogene homolog | |
| 172 | image: 22295 | ughs.343220:175 | crk | nm_005206, | v-crk sarcoma virus ct10 oncogene | SEQ ID NO: 1769 |
| | | | | nm_016823 | homolog (avian) | SEQ ID NO: 1770 |
| 265 | image: 291448 | ughs.95972:175 | silv | nm_006928 | silver homolog (mouse) | SEQ ID NO: 1771 |
| 315 | image: 325641 | ughs.534030:175 | psg5 | nm_002781 | pregnancy specific beta-1- | SEQ ID NO: 1772 |
| | | | | | glycoprotein 5 | |
| 443 | image: 47986 | ughs.149609:175 | itga5 | nm_002205 | integrin, alpha 5 (fibronectin | SEQ ID NO: 1652 |
| | | | | | receptor, alpha polypeptide) | |
| 499 | image: 530037 | ughs.244230:175 | | | full-length cdna clone cs0di056yj24 | |
| | | | | | of placenta cot 25-normalized of | |
| | | | | | homo sapiens (human) | |
| 532 | image: 549065 | ughs.169744:175 | g22p1 | nm_001469 | thyroid autoantigen 70 kda (ku | SEQ ID NO: 1773 |
| | | | | | antigen) | |
| 554 | image: 594120 | ughs.8364:175 | pdk4 | nm_002612 | pyruvate dehydrogenase kinase, | SEQ ID NO: 1774 |
| | | | | | isoenzyme 4 | |

[0082] Tables 2 to 8 provide, for each set listed, certain features, some of which are redundant with Table 1 and some of which are additional. For instance, certain reference sequences (“NM_xxxxxx”) in the “Reference Sequences” column of Tables 2 to 8 are supplemental to the sequences mentioned in the “Ref.” column of Table 1. This “Reference Sequences” column provides one or more mRNA references for a specific corresponding gene. These mRNAs, that represent the various splice forms currently identified in the art, are encompassed by the nucleotide sequence sets listed in Tables 2 to 8. Each of these mRNAs can be considered as a marker in the meaning of the present invention. The use of the “NM_xxxxxx” references herein would be clearly understood by a person skilled in the art who is familiar with this type of referencing system. The sequences corresponding to each “NM_xxxxxx” reference (or corresponding splice forms) are available, e.g., in the OMIM and LocusLink databases (NCBI web site) and are incorporated herein by reference. An “NM_xxxxxx” reference is therefore a constant; i.e., it will always designate the same sequence over time and whatever the source (database, printed document, or the like).

[0083] Each set described herein comprises sequence(s) mentioned in Table 1 and, in addition, can comprise the “NM_XXXXXX” sequence and splice form(s) thereof mentioned in Tables 2 to 8 for each same set. For example, the sequences that comprise Set 1 are SEQ ID No. 1, 2 (of Table 1) and nm_{—}001747 sequence (of Table 2), including subsequences, or complements thereof, as described previously. In case of redundancy between the “Ref.” column of Table 1 and the “References Sequences” column of Tables 2 to 8 (i.e., if a “NM_XXXXXX” reference sequence corresponds to a SEQ ID sequence already mentioned in “Ref” column of Table 1), only one of these sequences may be considered.

[0084] The present invention further relates to a polynucleotide library useful for the molecular characterization of a colon cancer, comprising or corresponding to a pool of polynucleotide sequences which are either overexpressed or underexpressed in one or more of the above-cited tissues (e.g., colon tissue) said pool corresponding to all or part of the polynucleotide sequences (or markers) selected as defined above.

[0085] The detection of over or under expression of polynucleotide sequences according to the method of the invention can be carried out by fluorescence in-situ hybridization (FISH) or immuno histochemical (IHC), methods. Such detection can be performed on nucleic acids from a tissue sample, e.g., from one or more of the above-cited tissues, e.g., colorectal tissue sample, or from a tumor cell line.

[0086] The invention also relates particularly to a method performed on DNA or cDNA arrays; e.g., DNA or cDNA microarrays.

[0087] The detection of over or under expression of polynucleotide sequences according to the method of the invention can also be carried out at the protein level. Such detections are performed on proteins expressed from nucleic acid in one or more of the above-cited tissue samples.

[0088] Accordingly, a further method according to the present invention comprises:

[0089] a) obtaining a sample comprising proteins from a colorectal tissue sample from a subject; and

[0090] b) measuring in said sample obtained in step (a) the level of those proteins encoded by a polynucleotide library according to the invention.

[0091] The present invention is useful for detecting, diagnosing, staging, classifying, monitoring, predicting, and/or preventing colorectal cancer. It is particularly useful for predicting clinical outcome of colon cancer and/or predicting occurrence of metastatic relapse and/or determining the stage or aggressiveness of a colorectal disease in at least about 50%, e.g., at least about 55%, at least about 60%, at least about 65%, at least about 70%, at least about 75%, at least about 80%, at least about 85%, at least about 90%, at least about 95%, or about 100% of the subjects. The invention is also useful for selecting a more appropriate dose and/or schedule of chemotherapeutics and/or biopharmaceuticals and/or radiation therapy to circumvent toxicities in a subject.

[0092] By “aggressiveness of a colorectal disease” is meant, e.g., cancer growth rate or potential to metastasize; a so-called “aggressive cancer” will grow or metastasize rapidly or significantly affect overall health status and quality of life.

[0093] By “predicting clinical outcome” is meant, e.g., the ability for a skilled artisan to classify subjects into at least two classes (good vs. poor prognosis) showing significantly different long-term Metastasis Free Survival (MFS).

[0094] In particular, the method of the invention is useful for classifying cell or tissue samples from subjects with histopathological features of colorectal disease, e.g., colon tumor or colon cancer, as samples from subjects having a “poor prognosis” (i.e., metastasis or disease occurred within 5 years since diagnosis) or a “good prognosis” (i.e., metastasis- or disease-free for at least 5 years of follow-up time since diagnosis).

[0095] The present invention further relates to a method of assigning a therapeutic regimen to subject with histopathological features of colorectal disease, for example colon cancer, comprising:

[0096] a) classifying said subject having a “poor prognosis” or a “good prognosis” on the basis of the method of analysing according to the present invention;

[0097] b) assigning said subject a therapeutic regimen, said therapeutic regimen (i) comprising no adjuvant chemotherapy if the subject is lymph node negative and is classified as having a good prognosis, or (ii) comprising chemotherapy if said subject has any other combination of lymph node status and expression profile.

[0098] For example, the assigning of a therapeutic regimen can comprise the use of an appropriate dose of irinotecan drug compound. For example, this dose is selected according to the presence or the absence of a polymorphism(s) in a uridine diphosphate glucuronosyltransferase I (UGT1A1) gene promoter of the subject. For example, a polymorphism may be the presence of an abnormal number of (TA) repeats in said UGT1A1 promoter.

[0099] More generally, the invention is also useful for selecting appropriate doses and/or schedules of chemotherapeutics and/or (bio)pharmaceuticals, and/or targeted agents, which can include irinotecan, 5-fluorouracil, fluorouracil, levamisole, mitomycin, lomustine, vincristine, oxaliplatin, methotrexate, and anti-thymidilate synthase. Further relevant anti-colorectal cancer agents are known in the art. These agents may administered alone or in combination.

[0100] The method for analyzing differential gene expression associated with histopathologic features of colorectal disease according to the present invention, e.g., the method for classifying cell or tissue samples, allows one to achieve high specificity and/or sensitivity levels of at least about 80%, at least about 85%, at least about 90%, at least about 91%, at least about 92%, at least about 93%, at least about 94%, at least about 95%, at least about 96%, at least about 97%, at least about 98%, or at least about 99%.

[0101] By “specificity” is meant:
Number of true negative samples×100/(Number of true negative samples+Number of false positive samples)

[0102] By “sensitivity” is meant:
Number of true positive samples×100/(Number of true positive samples+Number of false negative samples)

[0103] With reference to the figures:

[0104] FIG. 1 shows global gene expression profiles in colorectal cancer and non-cancerous samples. 1A—Hierarchical clustering of 50 samples and ˜9,000 cDNA clones based on mRNA expression levels. Each row represents a clone and each column represents a sample. Expression level of each gene in a single sample is relative to its median abundance across all samples and depicted according to a color scale shown at the bottom. Red and green indicate expression levels above and below the median, respectively. The magnitude of deviation from the median is represented by the color saturation. Grey indicates missing data. Dendrogram of samples (above matrix) and genes (to the left of matrix) represent overall similarities in gene expression profiles. For samples, black branches represent normal tissues (n=23), red branches represent cancer tissues (n=22) and purple branches represent cancer cell lines (n=5). Colored bars to the right indicate the locations of 7 gene clusters of interest. These clusters, except the “proliferation cluster” (brown bar), are zoomed in B. 1B—Top panel: dendrogram of samples: tissue samples are designated with numbers followed by N when non-cancerous tissue and T when tumor tissue. Lower panel: expanded view of selected gene clusters named from top to bottom: “MHC class II”, “stromal”, “MHC class I”, “interferon-related”, “early response”, “smooth muscle” and “proliferation”. Genes are referenced by their HUGO abbreviation as used in “Locus Link”. 1C—Dendrogram of samples representing the results of the same hierarchical clustering applied only to the 22 cancer tissue samples. Two groups of samples (A and B) are defined. Sample names and branches highlighted in blue and in red represent patient samples without and with metastatic disease at diagnosis (labelled by *) or during follow-up, respectively. Status of each patient at last follow-up is marked by A (alive) or D (deceased)from CRC.

[0105] FIG. 2 shows hierarchical classification of tissue samples using genes which discriminate between normal and cancer samples. 2A—Hierarchical clustering of the 45 colon tissue samples using expression levels of the 245 cDNA clones were significantly different between normal and cancer samples. Dendrogram of these samples are magnified in B. 2B—Dendrogram of samples: black branches represent normal tissues (n=23) and red branches represent cancer tissues (n=22).

[0106] FIG. 3 shows hierarchical classification of CRC tissue samples using genes that discriminate metastatic from non-metastatic samples, correlated with survival. 3A—Hierarchical clustering of the 22 CRC tissue samples based on expression levels of the 244 cDNA clones was significantly different between metastatic and non-metastatic cancer samples. Dendrogram of samples is zoomed in B. 3B—Dendrogram of samples: blue represents samples without metastasis and red represents samples with metastasis at diagnosis (labelled by *) or during follow-up. A means alive at last follow-up and D means dead, from CRC. The analysis delineates 2 groups of tumors, group 1 and group 2. 3C—Kaplan-Meier plots of metastasis-free survival and overall survival of the 2 groups of samples defined by hierarchical clustering for all patients (left, n=22) and AJCC 1-3 patients (right, n=16).

[0107] FIG. 4 shows hierarchical classification of CRC tissue samples using discriminator genes selected by supervised analyses based on lymph node status, MSI phenotype and location of tumors. 4A—Hierarchical clustering of the 21 CRC tissue samples based on expression levels of the 46 cDNA clones significantly different between lymph node-positive (LN+, n=5, red branches and names) and lymph node-negative (LN−, n=16, blue branches and names) cancer samples. Each gene is identified by IMAGE cDNA clone number, HUGO abbreviation, and chromosomal location. EST means expressed sequence tag for clones without significant identity to a known gene or protein. 4B—Hierarchical clustering of the 22 CRC tissue samples based on expression levels of the 58 cDNA clones significantly different between MSI+ (MSI, n=8, blue branches and names) and non-MSI (n=14, red branches and names) cancer samples. 4C—Hierarchical clustering of the 22 CRC tissue samples based on expression levels of the 46 cDNA clones was significantly different between cancer samples from right colon (R, n=6, blue branches and names) and left colon (L, n=13, red branches and names).

[0108] FIG. 5 shows analysis of NM23 protein expression in colorectal tissue samples using tissue microarrays. Protein expression of NM23 was analysed using tissue microarrays containing 190 pairs of cancer samples and corresponding normal mucosa. 5A—Hematoxylin & Eosin staining of a paraffin block section (25x30) from a tissue microarray containing 216 tumors (3×55) and control samples. 5B—Five-μm sections of 0.6 mm core biopsies of cancer colorectal samples stained with anti-NM23 antibody are shown. Sections e and f are from CRC patients without metastasis (strong staining) and Sections g and h are from CRC patients with metastasis (low staining). 5C—Kaplan-Meier plots of overall survival in AJCC1-3 patients according to NM23 protein expression levels. Magnification is 50× in B-E.

### EXAMPLE

[0109] The invention will now be illustrated with the following non-limiting examples.

[0110] 1) Gene expression profiling of CRC and unsupervised classification

[0111] The mRNA expression profiles of 50 cancer and non-cancerous colon samples, including 45 clinical tissue samples and 5 cell lines, were determined using DNA microarrays containing ˜9,000 spotted PCR products from known genes and ESTs. Both unsupervised and supervised analyses were performed on all samples following normalization of expression levels.

[0112] Unsupervised hierarchical clustering of all samples based on the total gene expression profile was first applied. Results were displayed in a color-coded matrix (FIG. 1A) where samples were ordered on the horizontal axis and genes on the vertical axis on the basis of similarity of their expression profiles. The 50 samples were sorted into two large clusters that extensively differed with respect to normal or cancer type (FIG. 1B, top): 87% were non-cancerous in the left cluster and 87% were cancerous in the right cluster. As expected, the CRC cell lines represented a branch of the “cancer” cluster. Hierarchical clustering also allowed identification of clusters of gene expression corresponding to defined functions or cell types, some of which are indicated by colored bars on the right of FIG. 1A, and which are zoomed in FIG. 1B. Three clusters are overexpressed in tissue samples overall as compared to epithelial cell lines, reflecting the cell heterogeneity of tissues: an “immune cluster” with different subclusters including a MHC class I subcluster that correlated with an interferon-related subcluster, a MHC class II subcluster, which is a “stromal cluster” enriched with genes expressed in stromal cells (COL1A1, COL1A2, COL3A1, MMP2, TIMP1, SPARC, CSPG2, PECAM, INHBA), and a “smooth muscle cluster” (CNN1, CALD1, DES, MYH11, SMTN, TAGL) that was globally overexpressed in normal tissue as compared to cancer tissues. An “early response cluster” included immediate-early genes (JUNB, FOS, EGR1, NR4A1, DUSP1) involved in the human cellular response to environmental stress. Conversely, a very large cluster, defined as a “proliferation cluster”, was generally overexpressed in cell lines as compared to tissues, probably reflecting the proliferation rate difference between cells in culture and tumor tissues. This cluster included PCNA that codes for a proliferation marker used in clinical practice, as well as many genes involved in: glycolysis, such as GAPD, LDHA, ENO1; cell cycle and mitosis, such as CDK4, BUB3, CDKN3, GSPT2; metabolism, such as ALDH3A1, cytochrome C oxidase subunits, and GSTP1, and protein synthesis such as genes coding for ribosomal proteins.

[0113] The same clustering algorithm applied only to the 22 CRC clinical samples sorted two groups of tumors (A, 10 patients and B, 12 patients) that differed with respect to AJCC stage and clinical outcome (FIG. 1C). Group A included a high proportion of patients presenting with metastases at diagnosis (AJCC4 stage, 5 out of 10) as compared with group B (1 out of 12). Interestingly, 3 out of 5 “AJCC1-3” patients of group A experienced metastatic relapse after a median duration of 18 months (range, 4 to 88) from diagnosis and died from CRC, while none of the 11 “AJCC1-3” patients of group B relapsed or died after a median follow-up of 69 months (range, 10 to 98). This suggests that patients are at higher risk for metastasis in group A than in group B. To identify particular sets of genes that could better define subgroups of samples, supervised analyses were then conducted.

[0114] 2) Differential gene expression between normal colon and colon tumors

[0115] To identify and rank genes with significant differential expression between cancer (22 samples) and non-cancerous colon tissues (23 samples), a discriminating score (DS) combined with iterative random permutation tests was applied. Two hundred forty-five cDNA clones, 130 of which were overexpressed and 115 were underexpressed in cancer samples, were identified. These clones corresponded to 237 unique sequences that represented 191 different known genes and 46 ESTs. The function of the known genes, as given in the OMIM and LocusLink databases (NCBI web site), are listed in Table. 1 above. Samples were then reclustered on the basis of these genes (FIG. 2), with a good resulting discrimination between normal and cancer samples: in the left branch 90% of samples were cancerous, while in the large right branch 92% were normal.

[0116] 3) Differential gene expression within CRC tissue samples

[0117] A supervised approach was applied to the 22 cancer tissue samples by comparing tumor subgroups defined by relevant histoclinical parameters.

[0118] 3.a) Genes associated with visceral metastases

[0119] The occurrence of metastasis is the leading cause of death in patients with CRC. Accurate predictors of metastasis are needed to determine therapeutic strategies and improve survival. Two hundred forty-four cDNA clones, corresponding to 235 unique sequences representing 194 characterized genes and 41 ESTs, were identified that discriminated between primary tumor samples collected from patients with and without metastasis at time of diagnosis or during follow-up. Among these clones, 219 were underexpressed and 25 were overexpressed in metastatic samples as compared to non-metastatic samples. Hierarchical clustering of samples based on expression of these selected genes (FIGS. 3A-B) successfully classified patients according to outcome, with only two non-metastatic samples misplaced in the group 2. Significantly, differences of survival between the two groups were statistically significant (FIG. 3C). The 5-year MFS (Metastatic Free Survival) and OS (Overall Survival) were 100% for group 1 (n=11) and 18% and 30%, respectively, for group 2 (n=11) (p=0.0001 and p=0.001). MFS and OS were 100% for group 1 (n=11) and 40% for the group 2 (n=5) when only patients without metastatic disease at time of diagnosis (AJCC1-3 stage) were considered (p=0.005 and p=0.006, respectively). Finally, MFS and OS were 100% for group 1 (n=10) and 50% for the group 2 (n=4) when only AJCC1-2 patients (no metastatic disease and node-negative tumor at time of diagnosis) were considered (p=0.019 and p=0.022, respectively).

[0120] 3.b) Genes associated with lymph node metastases

[0121] Pathological lymph node involvement at diagnosis is a strong prognostic parameter in CRC. Its determination relies on surgical dissection, which currently requires biopsy of individual lymph nodes. Surgical lymph-node biopsy has major disadvantages, such as patient discomfort and the fact that metastases, particularly micrometastases, are often missed by surgical biopsy. Lymph node involvement is dependent on the heterogenous expression, and complex interaction(s) of these genes, to promote metastatic invasion and clinical outcome. Large-scale expression analyses provide a solution to identify these genes and the complexity of their interactions to drive tumorigenesis and metastatic invasion, as reported for breast or gastric cancers.

[0122] Forty-six cDNA clones (41 known genes and 5 ESTs) were identified as significantly differentially expressed between tumors with (n=5) and without (n=16) lymph node metastasis. Reclustering based on these 46 genes correctly separated node-positive from node-negative samples (FIG. 3A). The two samples (9075T and 7442T) that, among all node-negative cases, had expression patterns more closely related to node-positive samples, displayed metastatic disease at time of diagnosis (7442T) and 23 months after surgery (9075T), corroborating the predictions based on molecular signature.

[0123] 3.c) Genes associated with MSI phenotype and with location of cancer

[0124] To obtain additional insights in colorectal oncogenesis, differential gene expression between MSI+(n=8) and non-MSI (n=14) tumors and between tumors from right colon (n=6) and left colon (n=13) were analyzed.

[0125] Fifty-eight cDNA clones (representing 51 known genes and 5 ESTs) with significant differential expression between MSI+ and non-MSI tumors were identified. The discriminator potential of these clones was confirmed by hierarchical classification of samples based on their expression levels, even if some MSI+ tumors displayed an intermediate expression profile (FIG. 4B). Similarly, classification of 19 samples (excluding transverse colon tumors), based on the expression of 46 cDNA genes (35 known genes and 11 ESTs) differentially expressed between right and left colon cancers, correctly sorted samples from the right or left colon (FIG. 4C). Such discrimination agreed with the existence of two distinct categories of CRC according to the location of tumor

[0126] 3.d) Immunohistochemistry on tissue microarrays.

[0127] The protein expression levels of the most significant discriminatory genes identified by supervised analyses on TMA's containing 190 pairs of cancer samples and corresponding normal mucosa were measured. Use of TMA allowed the measurement of the expression levels simultaneously and in identical conditions. IHC results using an anti-NM23 antibody (which detects both NMEI and NME2 proteins)are shown in FIG. 5. Consistent with DNA microarray results, NM23 was significantly overexpressed in cancer samples as compared to non-cancerous samples (p=5.6×10⁻⁶, Fisher exact test), and was significantly down-regulated in tumors with metastasis (cut-off was the median value) compared to tumors without metastasis (p=0.04, Fisher exact test). The 5-year MFS was 68% for negative and 88% for positive samples when considering the 111 AJCC1-3 patients with available IHC data (p=0.02, log-rank test). Conversely, no such correlation, identified using DNA microarrays, was found for the protein expression levels of prohibitin and decorin.

[0128] 4) Discussion

[0129] DNA microarray-based gene expression profiling is a promising approach to investigate the molecular complexity of cancer. To date, CRC studies have not directly addressed the issue of prognosis or MSI phenotype. Fifty cancer and non-cancerous colon tissue samples was profiled and expression profiles were correlated with histoclinical parameters of disease, including survival, using both unsupervised and supervised analyses.

[0130] 4a) Unsupervised analysis

[0131] Global gene expression profile revealed extensive transcriptional heterogeneity between samples, notably cancer samples. It was to some extent already able to distinguish clinically relevant subgroups of samples: normal versus cancer tissues as previously reported, notably for CRC, and good versus poor prognosis tumors. Such global classification is usually imperfect because of the excessive noise generated by large gene sets that mask the identification of signicant discriminatory genes (such as clinical outcome) governed by a smaller set. Importantly, described global approach allows identification of discrete expression patterns to define clinical useful classification among patients with CRC: for example, several gene clusters that correspond to cell types (stroma, smooth muscle, MHC class I and II) or function (interferon-related, immediate-early response and proliferation) that have been reported in previous studies were identified; hence the validity of the present data consistent with putative biologic function.

[0132] 4b) Supervised analyses

[0133] To identify smaller sets of discriminator genes that may improve classification of samples and facilitate translation in clinical practice, supervised statistical analyses were done, based on predefined groups of samples.

[0134] i) Comparison of normal vs cancer samples.

[0135] A total of 245 discriminator cDNA clones (3%) were significantly differentially expressed between normal and cancer samples. This ratio is in agreement with those reported in the literature. Comparison with lists of discriminator genes previously identified in CRC using DNA microarrays revealed many common genes, further underlying the validity of the present data. For example, CA4, CHGA, CNN1, MYH11, FCGBP, KCNMB1, SST were down-regulated, whereas CA3, CCT4, EIF3S6 or EEF1A1, IFITM1, CSE1L, NME1 or RAN were up-regulated in cancer samples. Beyond these common genes, many additional genes to improve the accuracy of previously described predictive signatures were identified.

[0136] Among the underexpressed genes in cancer samples were genes encoding cytokines (IL10RA, IL1RN, IL2RB), proteins involved in lipid metabolism (LPP, LIAS, LRP2, MGLL), signal transducers (PLCD1, PLCG2, mTOR/FRAP1), transcription factors such as RELA, and known or putative tumor suppressor genes (TSG). CTCF encodes a transcriptional repressor of MYC and is located in 16q22.1, a chromosomal region frequently deleted in breast and prostate tumors; IRF1, a transcriptional activator of genes induced by cytokines and growth factors, regulates apoptosis and cell proliferation and is frequently deficient in human cancers. The underexpression of GSN (gelsolin), combined with that of PRKCB1 (protein kinase C, beta 1), may lead to decreased activation of PKCs involved in phospholipid signalling pathways that inhibit cell proliferation and tumorigenicity.

[0137] The top-ranked gene overexpressed in cancer samples was GNB2L1 (also named RACK1) that encodes a beta polypeptide 2-like 1 of a guanine nucleotide binding protein (G protein) involved in signal transduction and activation of PKC. It also interacts with IGF1R, shown to play a pivotal role in colorectal oncogenesis; this interaction may regulate IGF1-mediated AKT activation and protection from cell death as well as IGF1-dependent integrin signalling and promote cell extravasion and contact with extracellular matrix (ECM). Other genes have already been reported as up-regulated in other types of cancer: they encode SNRPs and SOX transcription factors (SNRPC, SNRPE, SOX4, SOX9), components of ECM, and molecules involved in vascular and extracellular remodelling (COL5A1, P4HA1, MMP13, LAMR1). BZRP, that codes for the peripheral benzodiazepine receptor, cell cycle genes (CCNB2, CDK2), and SAT, involved in polyamine metabolism were also identified. Consistent with previous reports, we identified the overexpression in cancer samples of SERPINB5 and NME1, encoding two potential TSGs. Overexpression of NME1 combined with underexpression of CTCF interacts to induce overexpression of the MYC oncogene, an important modulator of WNT/APC signalling shown to play an important role in the development of CRC. Other up-regulated genes, and potential therapeutic targets, include kinases (PTK2, STK6, NTRK2), the cell-surface protein CD9, and three genes encoding integrins ITGA2, ITGAL and ITGB3. The integrin pathway was further affected with variations in the expression of genes encoding PTK2, TGFB1I1/HIC5 (a PTK2 interactor), and integrin-linked kinase ILK. Agrawal et al. previously identified osteopontin, an integrin-binding protein as a marker of CRC progression. SPP1 that codes for osteopontin, as well as CXCL1 which codes for GRO1 oncogene or CDK4, were not in the present stringent list of discriminator genes, although overexpressed in cancer samples with a fold-change greater or equal to 2.

[0138] Discriminator genes were associated with many cell structures, processes and functions, including general metabolism (the most abundant category), cell cycle, proliferation, apoptosis, adhesion, cytoskeletal remodelling, signal transduction, transcription, translation, RNA and protein processing, immune system and others. Up- and down-regulated genes were rather equally distributed with respect to these functions, except for those coding for kinases and for proteins involved in extracellular matrix remodelling, metabolism, RNA and protein processing (translation, ribosomal proteins and chaperonins), which were overexpressed in cancer samples as compared to normal samples. This phenomenon, already reported, is likely to be related to increased metabolism and cell proliferation in cancer cells.

[0139] Analysis of chromosomal location point to two interesting regions. Six genes up-regulated in cancer (STK6, UBE2C, PFDN4, RPS21, CSE1L, SLPI) were located in 20q13, a chromosomal region often amplified in cancer; their overexpression might be a consequence of gene amplification. This has already been observed by others, although not all genes of the region are affected transcriptionally. Conversely, six genes (TJP3, INSR, ELAVL1, MAP2K7, CNN1, NR2F6) down-regulated in cancer samples were located in 19p13.1-p13.3, already known to harbour several potential TSG such as APC2, STK11 or MCC2.

[0140] ii) Expression profiles and clinical outcome

[0141] All subjects, some of them presenting with metastasis at diagnosis, had received standard treatment. Significantly, the described method for global hierarchical clustering from subjects with non-metastatic tumors that clustered with metastatic cases eventually developed metastasis and died during follow-up. Supervised analysis further improved the prognostic classification by identifying 194 known genes and 41 ESTs that well discriminated between samples without or with metastasis at diagnosis or during follow-up. This is the first report that suggests a potential prognostic role of gene expression profiling in CRC. The significance of the prognostic classification made by AJCC stage and by expression levels of the present discriminator gene sets were compared. Classification based on AJCC stage (AJCC1-2 tumors, n=14, vs AJCC3-4 tumors, n=8) was significant (p=0.001; Kaplan-Meier survival analysis, log-rank test), but less than that made by expression profiles (Fisher's exact test, p=0.05 vs p=0.003). Significantly, the prognostic impact of our gene set was also confirmed when applied to patients without metastasis at diagnosis as well as to patients without metastasis and lymph node invasion.

[0142] In addition, the functional identities of the discriminator genes provided insight into the underlying molecular mechanism that drive the metastatic process, and contributed to the identification of potential novel therapeutic targets. For example, known genes that were down-regulated in metastatic tumors were DSC2, encoding desmocollin 2, a desmosomal and hemi-desmosomal adhesion molecule of the cadherin family, HPN, coding for hepsin, a transmembrane serine protease the favorable prognostic role of which has been recently highlighted in prostate cancer by studies using DNA and/or tissue microarrays. Decorin is a small leucine-rich proteoglycan abundant in ECM that negatively controls growth of colon cancer cells and angiogenesis. Low levels of mRNA have been associated with a worse prognosis in breast carcinomas. NME1 and NME2 were underexpressed in patients that developed metastasis, consistent with previous reports that these genes interacted to suppress metastasis. Prohibitin is a mitochondrial protein thought to be a negative regulator of cell proliferation and may be a TSG. Transcription of genes encoding mitochondrial proteins has been shown to be decreased during progression of CRC. This was confirmed in the present study, since all discriminator genes involved in mitochondrial metabolism were down-regulated in metastatic tumors (ATP5C1, BCKDK, CABC1, CKMT2, COX5B, COX6B, COX7A2, COX7A2L, COX7C, HSPA9B, LRIG1, MDH1, NDUFA1, NDUFA4, NDUFA6, NDUFA9, NDUFV1, SCO1, UQCR). Surprisingly, although increased protein synthesis is classically associated with oncogenic transformation, we found many genes coding for ribosomal proteins (RPL5, RPL6, RPL15, RPL29, RPL31, RPL39) were found that were down-regulated in metastatic tumors. The SMAD1/AMDH1 gene codes for a transmitter of TGFalpha signalling, which exerts a number of regulatory effects on colon cells and is involved in the metastatic process. The most significantly overexpressed genes in metastatic tumors were PCSK7, which codes for the proprotein convertase subtilisin/kexin type 7. Proprotein convertases (PCs) process latent precursor proteins into their biologically active products, including protein tyrosine phosphatases, growth factors and their receptors, and enzymes like matrix metalloproteases (MMPs), that may confer on them a functional role in the tumor cell invasion and tumor progression. Other up-regulated genes encoded various signalling proteins including PRAME, an interactor of the cytoskeleton-regulator paxillin, IQGAP1, a negative regulator of the E-cadherin/catenin complex-based cell-cell adhesion, LTPB4, a structural component of connective tissue microfibrils and local regulator of TGFβ tissue deposition and signalling, IGF1R, a transmembrane tyrosine kinase receptor, and DSG1, another desmosomal cadherin-like protein. The incorrect balance between the various desmosomal cadherins has been shown to facilitate separation of epithelial from the ECM and metastasis. IGF1R has been recently shown as involved in metastases of CRC by preventing apoptosis, enhancing cell proliferation, and inducing angiogenesis. Several genes located on the long arm of chromosome 15 were down-regulated in metastatic samples.

[0143] iii) Expression profiles and lymph node metastasis

[0144] Although nodal metastasis is currently the standard clinical method to predict patient prognosis, there is clear consensus that an improved diagnostic is required to accurately predict survival for patients with CRC. However, approximately one-third of node-negative CRC recur, possibly due to understaging and inadequate pathological examination of lymph nodes. Statistical models suggest that the mean number of nodes currently identified in patients is much too low to correctly classify nodal status. Expression profiles defined in primary tumors could help predict the presence of lymph node metastasis, as recently reported. Forty-six genes and ESTs were identified as discriminators between node-positive and node-negative tumors. Since lymph node status and metastatic relapse are correlated events, this invention includes the identification of novel genes that discriminate between tumors with or without metastasis.

[0145] For example, OAS1 and NTRK2 were overexpressed in node-positive tumors. NTRK2 encodes a neurotrophic tyrosine kinase, and aberrant mutation of NTRK2 has recently been shown to play a role in the metastastic process. OAS1 encodes the 2′,5′-oligoadenylate synthetase 1; the 2-5A system has been implicated in the control of cell growth, differentiation, and apoptosis. High levels of activity have been reported in individuals with disseminated cancer, and a recent study found overexpression of OAS1 mRNA in node-positive breast cancers. Conversely, MGP, PRSS8 and NME2 were down-regulated in node-positive tumors. MGP encodes the matrix G1a protein, the loss of expression of which has been associated with lymph node metastasis in urogenital tumors. The prostasin serine protease, encoded by PRSS8, is a potential invasion suppressor, and down-regulation of PRSS8 expression may contribute to invasiveness and metastatic potential. The present list of 46 discriminator clones also included additional genes, reflecting the non-perfect correlation between lymph node metastasis and visceral metastasis and the involvement of different underlying biological processes.

[0146] Among genes underexpressed in node-positive tumors were BUB3, TPP2 and ITIH1. BUB3 codes for a mitotic-spindle checkpoint protein that interacts with the APC protein to regulate chromosome segregation during cell division. Defects in mitotic checkpoints, including mutations of BUB1, have been associated with CRC and BUB genes (BUB1 and BUB1B) are underexpressed in highly metastatic colon cell lines. TPP2, encodes tripeptidyl peptidase II, a high molecular mass serine exopeptidase that may play a functional role by degrading peptides involved in invasive and metastatic potential as recently reported for another peptidyl peptidase DPP4. ITIH 1, encodes a heavy chain of proteins of the ITI family, that inhibits the metastatic spreading of H460M large cell lung carcinoma lines by increasing cell attachment.

[0147] iv) Expression profiles and MSI phenotype

[0148] Without wishing to be bound by any theory, it is believed that there are at least two distinct pathways of oncogenesis in sporadic CRC. Fifteen per cent of tumors present the MSI phenotype, which is related to the inactivation of MMR genes, principally MSH2 and MLH1. The genetically unstable tumor cells accumulate somatic clonal mutations in their genome, which may disturb mRNA expression or degradation of specific transcripts. Conversely, 85% of sporadic tumors are associated with a non-MSI (or MSS) phenotype; they are characterized by chromosome instability and loss of genomic material that may count for the loss of expression of specific alleles. MSI+ tumors are frequently diploid, located in the proximal colon, and may be associated with better prognosis and response to chemotherapy. Reliable distinction between MSI+ and non-MSI phenotypes, currently based on molecular approaches, remains problematic and difficult to assess/confirm in the clinical setting; largely due to the number and heterogeniety of genes involved, absence of easily identifiable mutationional hot-spots, and epigenetic inactivation. Other methods are being tested such as IHC assessment of MSH2 and MLH1

[0149] Although the underlying molecular mechanisms of MSI+ and non-MSI colorectal oncogenesis remain unclear, it appears that these two phenotypes represent different molecular entities that could translate into distinct gene expression profiles useful in clinical practice as new diagnostic markers and/or tests. The present supervised analysis of MSI+ and non-MSI CRC clinical samples showed 58 differentially expressed clones. It is of note that arrayed MMR genes (MSH2, MSH3, MLH1, MLH3, PMS1 and PMS2) were not among these discriminator genes. As reported for cell lines, several of these deregulated genes are involved in cell cycle control, mitosis, transcription and/or chromatin structure (RAN, PTPN21, TP53, MORF4L1, ZFP36L2, PSEN1, IGF2, ASNS, RPS4X, CCNF, ZNF354A). The top down-regulated gene in MSI+ tumors was EIF3S2, that encodes the eukaryotic translation initiation factor 3, and subunit 2β, also known as TRIP1 (TGFalpha receptor-interacting protein 1). TRIP1 specifically associates with TGFBRII, a serine/threonine kinase receptor frequently inactivated by mutation and down-regulated in MSI+ tumors.

[0150] v) Validation studies

[0151] Many different cell processes are aberantly modulated during colorectal oncogenesis. Genes involved in adhesion processes are affected in metastasis. Genes known to be affected in oncogenesis, such as MMR genes, do not discriminate tumor subgroups. DNA microarray data could prove rapidly useful in clinical practice and design of new therapeutic options. The described DNA micro-array approach may be ideally suited to elucidate the complex and heterogeneous processes that drive CRC progression in individual patients, significantly improve clinical treatment of CRC, and optimize the use of novel therapeutic options. Discriminator genes represent potential new diagnostic and prognostic markers and/or therapeutic targets, and deserve further investigation in larger series of subjects. Novel markers of potentially differentially expressed molecules were identified using IHC on TMA containing 190 pairs of cancer samples and corresponding normal mucosa. TMA confirmed the correlations between NM23 expression level and two clinical parameters: non-cancerous or cancer status and survival of patients. Expression was higher in cancer samples, and low expression was significantly associated with a shorter MFS. Such correlation has been described in a variety of malignant tumors, including breast, ovarian, lung or gastric cancers as well as melanoma. However, this correlation remains controversial in CRC, with positive and negative reports. The present invention allowed measurement of the expression levels simultaneously and under highly standardized conditions for all the 190 CRC samples, representing one of the largest series of CRC samples tested for NM23 IHC. 0 As previously described, correlation between protein and mRNA levels would not be expected in all cases. This was the case for Decorin and Prohibitin.

[0152] vi) Conclusion.

[0153] The data presented in this nonlimiting Examples section shows that mRNA expression profiling of CRC using DNA microarrays provides for identification of clinically relevant tumor subgroups, defined upon combined expression of genes. The genes delineated in this invention can contribute to the understanding of CRC development and progression, and may lead to improved and new diagnostic and/or prognostic markers, identify new molecular targets for novel anticancer drugs, and may also lead to significant improvements in CRC management.

[0154] V—Materials and Methods used in the above Examples

[0155] 1) Colorectal cancer patients and samples

[0156] A total of 50 samples including 45 tissue samples and 5 cell lines were profiled using DNA microarrays. The 45 colon tissue samples were obtained from 26 unselected patients with sporadic colorectal adenocarcinoma who underwent surgery at the Institut Paoli-Calmettes (Marseille, France) between 1990 and 1998. Samples were macrodissected by pathologists, and frozen within 30 min of removal in liquid nitrogen for molecular analyses. All tumor samples contained more than 50% tumor cells. The 45 samples included 22 cancer samples and 23 normal samples divided into 19 tumor-normal pairs (based on availability of a sample of the corresponding normal colonic mucosa), 3 tumors and 4 normal specimens provided from different patients. All tumor sections and medical records were de novo reviewed prior to analysis. MSI phenotype of 22 cancer samples was determined by PCR amplification using BAT-25 and BAT-26 oligonucleotide primers, and by IHC using anti-MSH2 and MLH1 antibodies. BAT-25 and BAT-26 are mononucleotide repeat microsatellites: a polyA²⁶ sequence located in the fifth intron of MSH2 for BAT-26, and located in an intron of the KIT gene for BAT-25. Tumors with alterations in both BAT markers were classified as MSI+. No attempt was made to further classify tumors into MSI-high and MSI-low phenotype. Main characteristics of patients and tumors are listed in Table 9. After colonic surgery, subjects were treated (delivery of chemotherapy or not) according to standard guidelines. After completion of therapy, subjects were evaluated at 3-month intervals for the first 2 years and at 6-month intervals thereafter. Search for metastatic relapse included clinical examination and blood tests completed by yearly chest X-ray and liver ultrasound and/or CT scan.

[0157] Five samples were represented by 2 different sporadic colon cancer cell lines with chromosomal instability phenotype, Caco2 and HT29. Three samples represented Caco2 in a differentiated state (named Caco2A, 2B and 2C)—i.e. at confluence (C), at C+10 days, at C+21 days—and one sample represented undifferentiated Caco2 (named Caco2D). Cell lines were obtained from the American Type Culture Collection and grown as recommended.

TABLE 9
Characteristics of cancer samples profiled using DNA microarrays

| | | | | | | | | MSI | | Outcome |
|---|---|---|---|---|---|---|---|---|---|---|
| Patient | Sex | Age | Location | Grade | pT UICC | pN UICC | AJCC Stage | status | Treatment | (months) |
| 7650 | M | 74 | descending colon | G | pT3 | pN1 | 4 (liver) | MSI | pS + pCT | AWC 4 |
| 8582 | F | 80 | ascending colon | P | pT3 | pN3 | 4 (liver) | MSI | pS | D 1 |
| 7442 | M | 64 | transverse colon | G | pT3 | pN1 | 4 (liver) | MSS | pS + pCT | D 32 |
| 8208 | M | 40 | transverse colon | M | pT3 | pN2 | 4 (liver) | MSS | cS + adj CT | D 41 |
| 7835 | F | 72 | transverse colon | G | pT3 | pN3 | 4 (liver) | MSS | pS + pCT | D 17 |
| 8656 | F | 57 | descending colon | G | pT3 | pN2 | 4 (liver) | MSS | cS + adj CT | AWC 66 |
| 8031 | F | 46 | descending colon | G | pT3 | pN2 | 3 | MSS | cS + adj CT | MR 4 - D 7 |
| 6927 | M | 71 | descending colon | G | pT3 | NA | NA | MSS | cS + adj CT | NED 10 |
| 9118 | F | 75 | ascending colon | G | pT3 | pN1 | 2 | MSI | cS + adj CT | NED 56 |
| 8904 | M | 80 | descending colon | G | pT3 | pN1 | 2 | MSI | cS | NED 18 |
| 6974 | M | 68 | ascending colon | P | pT3 | pN1 | 2 | MSI | cS + adj CT | NED 97 |
| 8646 | M | 74 | descending colon | G | pT3 | pN1 | 2 | MSS | cS | NED 63 |
| 8458 | M | 56 | descending colon | G | pT3 | pN1 | 2 | MSS | cS + adj CT | NED 69 |
| 6992 | F | 65 | ascending colon | G | pT3 | pN1 | 2 | MSS | cS + adj CT | NED 98 |
| 7094 | F | 87 | descending colon | G | pT3 | pN1 | 2 | MSS | cS | NED 64 |
| 8252 | F | 54 | rectum | G | pT4 | pN1 | 2 | MSS | cS + adj CT | NED 74 |
| 9075 | F | 45 | ascending colon | G | pT2 | pN1 | 1 | MSI | cS | MR23 - D38 |
| 7505 | M | 71 | ascending colon | G | pT1 | pN1 | 1 | MSI | cS | NED 88 |
| 7043 | M | 70 | descending colon | G | pT2 | pN1 | 1 | MSS | cS | NED 97 |
| 6952 | M | 58 | descending colon | G | pT2 | pN1 | 1 | MSS | cS | NED 65 |
| 7597 | F | 72 | rectum | G | pT2 | pN1 | 1 | MSS | cS | NED 87 |
| 7815 | M | 63 | rectum | G | pT2 | pN1 | 1 | MSI | cS | MR 10 - D 40 |

[0158] For the IHC study on Tissue Micro Array (TMA), a consecutive series of 191 sporadic CRC patients (including the 26 cases studied by DNA microarrays) treated between 1990 and 1998 at the Institut Paoli-Calmettes was selected. The study included 98 men and 92 women. The median age of patients at diagnosis was 64 years, (range, 29 to 97 years). In 58% of the cases, tumors were located in the distal part of the large bowel or sigmoid, 29% in the proximal part, and 13% in the rectum.

TABLE 10
Characteristics of cancer samples profiled using tissue microarrays.

| Characteristics | All patients (n = 191) |
|---|---|
| Sex (M/F) | 99/92 |
| Median age, years (range) | 64 (29-97) |
| Location of tumor | |
| ascending colon | 47 |
| transverse colon | 9 |
| descending colon | 110 |
| rectum | 21 |
| na | 4 |
| Grade | |
| good | 127 |
| poor | 50 |
| na | 14 |
| pT UICC | |
| 1 | 16 |
| 2 | 21 |
| 3 | 127 |
| 4 | 27 |
| pN UICC | |
| 1 | 88 |
| 2 | 48 |
| 3 | 54 |
| Na | 1 |
| Vascular invasion | |
| no | 115 |
| yes | 68 |
| na | 8 |
| AJCC stage* | |
| 1 | 29 |
| 2 | 51 |
| 3 | 43 |
| 4 | 68 |
| Surgery | 191 |
| curative/palliative | 131/59 |
| na | 1 |
| Chemotherapy | 109 |
| adjuvant/palliative | 60/49 |
| no chemotherapy | 80 |
| na | 2 |
| Median follow-up, months (range) | 74 (2, 133) |
| Metastatic evolution | 95 |
| metastatic relapse* | 27 |
| progression** | 68 |
| Death from CRC | 90 |

Legend:
M, male;
F, female;
na, not available;
pT, pathological staging of primary tumor;
UICC, International Union Against Cancer;
pN, pathological staging of regional lymph nodes;
AJCC, American Joint Committee on Cancer;
*AJCC1-3 patients;
**AJCC4 patients;
CRC, colorectal cancer.

[0159] 2) RNA extraction

[0160] Total RNA was extracted from frozen tumor samples by using standard guanadinium isothiocynanate and cesium chloride gradient techniques. RNA integrity was controlled by denaturing formaldehyde agarose gel electrophoresis and 28-S Northern blots before labelling.

[0161] 3) DNA microarray preparation

[0162] Gene expression analyses were performed with home-made Nylon microarrays containing 8,074 spotted cDNA clones, representing 7,874 IMAGE human cDNA clones and 200 control clones. According to the 155 Unigene release, the IMAGE clones were divided into 6,664 genes and 1,210 ESTs. All clones were PCR-amplified in 96-well microtiter plates (200 μl). Amplification products were desiccated and resuspended in 50 μl of distilled water. They were then spotted as previously described onto Hybond-N+2×7 cm² membranes (Amersham) adhered to glass slides, using a 64-pin print head on a MicroGridII microarrayer (Apogent Discoveries, Cambridge, England). All membranes used in this study belonged to the same batch.

[0163] 4) DNA microarray hybridizations

[0164] Microarrays were hybridized with ³³P-labeled probes: first with an oligonucleotide sequence common to all spotted PCR products (called “vector hybridization” to precisely determine the amount of target DNA accessible to hybridisation in each spot) and then, after stripping, with complex probes made from 2 μg of retrotranscribed total RNA. Probe preparations, hybridizations and washes were done as previously described and available from the website maintained by TAGC ERM206 (INSERM) under the heading “Materials and Methods, ” the entire disclosure of which is herein incorporated by reference. After the washing steps, arrays were exposed to phosphor-imaging plates that were then scanned with a FUJI BAS 5000 machine (25 μm resolution). Hybridization signals were quantified using ArrayGauge software (Fuji Ltd, Tokyo, Japan).

[0165] 5) Data analysis

[0166] Signal intensities were normalized for the amount of spotted DNA and the variability of experimental conditions (FB HMG99). Complex probe intensity of each spot (C) was first corrected (C/V) for the amount of target DNA accessible to hybridization as measured using vector hybridisation (V). When V intensity of a spot was too weak on a microarray, the corresponding cDNA clone was not considered for this experiment. Then, to minimize experimental differences between different complex probe hybridizations, C/V values from each hybridization were divided by the corresponding median value of C/V.

[0167] Unsupervised hierarchical clustering analysis then allowed the investigation of relationships between samples and between genes. This analysis was applied to data log-transformed and median-centred on genes using the Cluster and TreeView program (average linkage clustering using Pearson correlation as similarity metric). Supervised analysis was also used to identify and rank genes that distinguished between two subgroups of samples defined by an interesting histoclinical parameter. A discriminating score (DS) was calculated for each gene as DS=(M1−M2)/(S1+S2), where M1 and S1 respectively represent mean and standard deviation of expression levels of the gene in subgroup 1, and M2 and S2 in subgroup 2. Confidence levels were estimated by bootstrap resampling.

[0168] Statistical analyses were done using the SPSS software (version 10.0.5). Metastasis-free survival (MFS) and overall survival (OS) were measured from diagnosis until, respectively, the date of the first distant metastasis and the date of death from CRC. Survivals were estimated with the Kaplan-Meier method and compared between groups with the Log-Rank test. Data concerning patients without metastatic relapse or death at last follow-up were censored, as well as deaths from other causes. A p-value <0.05 was considered significant.

[0169] 6) Tissue microarrays (TMA) construction

[0170] The technique of TMA allowed the analysis of tumors and their respective normal mucosa simultaneously and under identical experimental conditions for the 190 subjects. TMA were prepared as described above, with slight modifications. For each sample, three representative sample areas were carefully selected from a hematoxylin-eosin stained section of a donor block. Core cylinders with a diameter of 0.6 mm each were punched from each of these areas and deposited into three separate recipient paraffin blocks, using a specific arraying device (Beecher Instruments, Silver Spring, Md.). In addition to pairs of tumor and normal mucosa, the recipient block also received control tissue (small intestine, adenomas) and cell lines pellets. Five-μm sections of the resulting TMA block were made and used for IHC analysis after transfer onto glass slides. Two colon tumor cell lines (CaCo-2, HT29) and one gastric tumor cell line (HGT1) were used as controls.

[0171] 7) Immunohistochemical analysis

[0172] Anti-NM23 rabbit polyclonal antibody was purchased from Dako (Dako, Trappes, France) and used at 1:100 dilution. IHC was carried out on five-μm sections of tissue fixed in alcohol formalin for 24 h and included in paraffin. Sections were deparaffinized in histolemon (Carlo Erba Reagenti, Rodano, Italy), and were rehydrated in graded alcohol. Antigen enhancement was done by incubating the sections in target retrieval solution (Dako) as recommended by the manufacturer. The reactions were carried out using an automatic stainer (Dako Autostainer). Staining was done at room temperature as follows: after washes in phosphate buffer, followed by quenching of endogenous peroxidase activity by treatment with 3% H₂O₂, slides were first incubated with blocking serum (Dako) for 30 min and then with the affinity-purified antibody for one hour. After washes, slides were incubated with biotinylated antibody against rabbit IgG for 20 min., followed by streptadivin-conjugated peroxydase (Dako LSAB^{R}2 kit). Diaminobenzidine or 3-amino-9-ethylcarbazole was used as the chromogen. Slides were counter-stained with hematoxylin, and coverslipped using Aquatex (Merck, Darmstadt, Germany) mounting solution. The slides were evaluated under a light microscope by two pathologists. The results were expressed in terms of percentage (P) and intensity (I) of positive cells as previously described: results were scored by the quick score (Q) (Q=P×I). For the TMA, the mean of the score of two core biopsies minimum was done for each case. Correlations between status of sample (non-cancerous or cancer, and cancer with or without metastasis) or Kaplan-Meier MFS curves and IHC data were investigated by using Fisher exact test and Log-Rank test. Statistical tests were two-sided at the 5% level of significance.

### References

[0173] Agrawal D, Chen T, Irby R, Quackenbush J, Chambers A F, Szabo M, Cantor A, Coppola D and Yeatman T J. (2002). J Natl Cancer Inst, 94, 513-521.

[0174] Alizadeh A A, Eisen M B, Davis R E, Ma C, Lossos I S, Rosenwald A, Boldrick J C, Sabet H, Tran T, Yu X, Powell J I, Yang L, Marti G E, Moore T, Hudson J, Jr., Lu L, Lewis D B, Tibshirani R, Sherlock G, Chan W C, Greiner T C, Weisenburger D D, Armitage J O, Warnke R, Botstein D, Brown P O and Staudt L M. (2000). Nature, 403, 503-511.

[0175] Alon U, Barkai N, Notterman D A, Gish K, Ybarra S, Mack D and Levine A J. (1999). Proc Natl Acad Sci U S A, 96, 6745-6750.

[0176] Backert S, Gelos M, Kobalz U, Hanski M L, Bohm C, Mann B, Lovin N, Gratchev A, Mansmann U, Moyer M P, Riecken E O and Hanski C. (1999). Int J Cancer, 82, 868-874.

[0177] Beer D G, Kardia S L, Huang C C, Giordano T J, Levin A M, Misek D E, Lin L, Chen G, Gharib T G, Thomas D G, Lizyness M L, Kuick R, Hayasaka S, Taylor J M, Iannettoni M D, Orringer M B and Hanash S. (2002). Nat Med, 8, 816-824.

[0178] Bertucci F, Houlgatte R, Nguyen C, Viens P, Jordan B R and Birnbaum D. (2001). Lancet Oncol, 2, 674-682.

[0179] Bertucci F, Nasser V, Granjeaud S, Eisinger F, Adelaide J, Tagett R, Loriod B, Giaconia A, Benziane A, Devilard E, Jacquemier J, Viens P, Nguyen C, Birnbaum D and Houlgatte R. (2002). Hum Mol Genet, 11, 863-872.

[0180] Birkenkamp-Demtroder K, Christensen L L, Olesen S H, Frederiksen C M, Laiho P, Aaltonen L A, Laurberg S, Sorensen F B, Hagemann R and T F O R. (2002). Cancer Res, 62, 4352-4363.

[0181] Devilard E, Bertucci F, Trempat P, Bouabdallah R, Loriod B, Giaconia A, Brousset P, Granjeaud S, Nguyen C, Birnbaum D, Birg F, Houlgatte R and Xerri L. (2002). Oncogene, 21, 3095-3102.

[0182] Fearon E R and Vogelstein B. (1990). Cell, 61, 759-767.

[0183] Frederiksen C M, Knudsen S, Laurberg S and T F O R. (2003). J Cancer Res Clin Oncol, 15, 15.

[0184] Garber M E, Troyanskaya O G, Schluens K, Petersen S, Thaesler Z, Pacyna-Gengelbach M, van de Rijn M, Rosen G D, Perou C M, Whyte R I, Altman R B, Brown P O, Botstein D and Petersen I. (2001). Proc Natl Acad Sci U S A, 98, 13784-13789.

[0185] Kitahara O, Furukawa Y, Tanaka T, Kihara C, Ono K, Yanagawa R, Nita M E, Takagi T, Nakamura Y and Tsunoda T. (2001). Cancer Res, 61, 3544-3549.

[0186] Lin Y M, Furukawa Y, Tsunoda T, Yue C T, Yang K C and Nakamura Y. (2002). Oncogene, 21, 4120-4128.

[0187] Mohr S, Leikauf G D, Keith G and Rihn B H. (2002). J Clin Oncol, 20, 3165-3175.

[0188] Notterman D A, Alon U, Sierk A J and Levine A J. (2001). Cancer Res, 61, 3124-3130.

[0189] Singh D, Febbo P G, Ross K, Jackson D G, Manola J, Ladd C, Tamayo P, Renshaw A A, D'Amico A V, Richie J P, Lander E S, Loda M, Kantoff P W, Golub T R and Sellers W R. (2002). Cancer Cell, 1, 203-209.

[0190] Tureci O, Ding J, Hilton H, Bian H, Ohkawa H, Braxenthaler M, Seitz G, Raddrizzani L, Friess H, Buchler M, Sahin U and Hammer J. (2003). Faseb J, 17, 376-385.

[0191] Vogelstein B, Fearon E R, Hamilton S R, Kern S E, Preisinger A C, Leppert M, Nakamura Y, White R, Smits A M and Bos J L. (1988). N Engl J Med, 319, 525-532.

[0192] Williams N S, Gaynor R B, Scoggin S, Verma U, Gokaslan T, Simmang C, Fleming J, Tavana D, Frenkel E and Becerra C. (2003). Clin Cancer Res, 9, 931-946.

[0193] Zou T T, Selaru F M, Xu Y, Shustova V, Yin J, Mori Y. Shibata D, Sato F, Wang S, Olaru A, Deacu E, Liu T C, Abraham J M and Meltzer S J. (2002). Oncogene, 21, 4855-4862.

1. A method for analyzing differential gene expression associated with histopathologic features of colorectal disease, comprising the detection of the overexpression or underexpression of a pool of polynucleotide sequences from colon tissues, said pool comprising all or part of the polynucleotide sequences, or subsequences or complements thereof, selected from each of predefined polynucleotide sequence sets 1 through 644.

2. The method for analyzing differential gene expression associated with colon tumors according to claim 1, wherein the predefined polynucleotide sequence sets are selected from the group consisting of:
1; 4; 9; 10; 11; 13; 15; 16; 17; 18; 21; 27; 28; 30; 31; 34; 37; 39; 41; 43; 45; 46; 52; 53; 58; 59; 60; 65; 68; 69; 70; 75; 76; 78; 79; 80; 84; 85; 87; 88; 90; 95; 96; 98; 99; 101; 105; 108; 110; 111; 113; 114; 116; 119; 120; 122; 124; 125; 126; 127; 130; 131; 138; 139; 140; 141; 143; 150; 152; 153; 155; 159; 164; 171; 175; 176; 178; 181; 182; 184; 185; 189; 192; 196; 197; 198; 203; 205; 207; 208; 210; 213; 214; 215; 216; 218; 221; 223; 225; 227; 231; 235; 241; 243; 251; 256; 259; 261; 262; 263; 264; 266; 267; 268; 270; 279; 281; 286; 287; 288; 291; 298; 299; 301; 307; 310; 312; 313; 317; 319; 329; 331; 332; 337; 338; 339; 340; 341; 342; 344; 346; 352; 354; 357; 360; 361; 366; 368; 369; 377; 379; 381; 384; 385; 386; 390; 392; 394; 395; 397; 398; 400; 401; 405; 406; 409; 410; 413; 423; 427; 434; 436; 437; 438; 440; 442; 443; 444; 445; 448; 454; 459; 463; 464; 467; 469; 470; 488; 492; 495; 500; 503; 507; 508; 516; 518; 520; 522; 524; 538; 543; 547; 549; 552; 555; 557; 561; 567; 568; 569; 573; 574; 583; 586; 588; 592; 596; 597; 598; 599; 600; 601; 604; 609; 610; 611; 614; 616; 617; 621; 626; 627; 629; 630; 631; 632; 634; 635; 636; 638; 641; 642; and 644.

3. The method of claim 1, wherein the predefined polynucleotide sequence sets are selected from the group consisting of:
1; 9; 10; 16; 18; 27; 28; 30; 39; 41; 43; 45; 53; 58; 60; 65; 69; 75; 76; 113; 116; 120; 122; 126; 127; 130; 131; 138; 139; 140; 141; 143; 150; 152; 153; 159; 181; 182; 184; 189; 192; 197; 198; 210; 213; 214; 216; 218; 225; 227; 243; 259; 261; 264; 266; 267; 268; 281; 286; 287; 288; 291; 299; 307; 312; 313; 317; 319; 332; 337; 338; 339; 340; 341; 342; 344; 354; 357; 360; 361; 368; 381; 384; 385; 392; 394; 397; 398; 405; 423; 427; 442; 444; 464; 467; 469; 488; 495; 500; 507; 508; 516; 520; 522; 524; 538; 543; 547; 549; 552; 561; 567; 568; 569; 573; 586; 588; 592; 596; 600; 609; 614; 627; 629; 630; 635; 636; 641; 642; and 644.

4. The method of claim 1, wherein the predefined polynucleotide sequence sets are selected from the group consisting of:
4; 11; 13; 15; 17; 21; 31; 34; 37; 46; 52; 59; 68; 70; 78; 79; 80; 84; 85; 87; 88; 90; 95; 96; 98; 99; 101; 105; 108; 110; 111; 114; 119; 124; 125; 155; 164; 171; 175; 176; 178; 185; 196; 203; 205; 207; 208; 215; 221; 223; 231; 235; 241; 251; 256; 262; 263; 270; 279; 298; 301; 310; 329; 331; 346; 352; 366; 369; 377; 379; 386; 390; 395; 400; 401; 406; 409; 410; 413; 434; 436; 437; 438; 440; 443; 445; 448; 454; 459; 463; 470; 492; 503; 518; 555; 557; 574; 583; 597; 598; 599; 601; 604; 610; 611; 616; 617; 621; 626; 631; 632; 634; and 638.

5. The method of claim 1, wherein the predefined polynucleotide sequence sets are selected from the group consisting of:
2; 3; 10; 22; 24; 25; 30; 32; 33; 35; 36; 39; 40; 41; 42; 47; 50; 54; 57; 67; 72; 86; 97; 102; 103; 104; 107; 117; 118; 120; 128; 130; 132; 133; 134; 137; 144; 145; 146; 147; 149; 153; 156; 158; 162; 163; 165; 169; 170; 173; 174; 179; 180; 188; 191; 193; 194; 195; 199; 200; 201; 202; 204; 206; 209; 210; 211; 212; 213; 214; 216; 217; 219; 222; 234; 238; 246; 248; 249; 250; 255; 271; 272; 273; 276; 277; 278; 282; 283; 284; 291; 292; 293; 294; 295; 296; 303; 304; 305; 306; 308; 312; 314; 318; 323; 324; 325; 326; 330; 336; 337; 338; 339; 340; 341; 342; 343; 344; 347; 349; 350; 351; 353; 356; 359; 360; 361; 362; 363; 364; 371; 372; 374; 378; 380; 381; 382; 383; 384; 387; 388; 393; 396; 397; 399; 402; 403; 408; 414; 415; 417; 418; 419; 420; 421; 422; 426; 428; 430; 432; 433; 441; 446; 449; 457; 458; 460; 465; 471; 472; 473; 475; 476; 478; 480; 481; 482; 484; 485; 486; 490; 493; 494; 497; 501; 502; 504; 505; 509; 510; 514; 516; 520; 525; 526; 527; 528; 529; 530; 537; 538; 539; 541; 545; 546; 550; 558; 559; 560; 561; 562; 564; 565; 566; 571; 576; 577; 578; 580; 581; 584; 585; 586; 590; 591; 593; 594; 595; 596; 602; 607; 609; 612; 613; 615; 623; 624; 625; 633; 635; 639; 640; 643; and 644,
and wherein differential gene expression associated with visceral metastases in colon cancer is detected.

6. The method of claim 5, wherein the predefined polynucleotide sequence sets are selected from the group consisting of:
36; 86; 104; 107; 117; 132; 144; 153; 156; 174; 191; 209; 248; 349; 350; 396; 417; 419; 432; 558; 566; 613; 623; 625; 633; and 643.

7. The method of claim 5, wherein the predefined polynucleotide sequence sets are selected from the group consisting of:
2; 3; 10; 22; 24; 25; 30; 32; 33; 35; 39; 40; 41; 42; 47; 50; 54; 57; 67; 72; 97; 102; 103; 118; 120; 128; 130; 133; 134; 137; 145; 146; 147; 149; 158; 162; 163; 165; 169; 170; 173; 179; 180; 188; 193; 194; 195; 199; 200; 201; 202; 204; 206; 210; 211; 212; 213; 214; 216; 217; 219; 222; 234; 238; 246; 249; 250; 255; 271; 272; 273; 276; 277; 278; 282; 283; 284; 291; 292; 293; 294; 295; 296; 303; 304; 305; 306; 308; 312; 314; 318; 323; 324; 325; 326; 330; 336; 337; 338; 339; 340; 341; 342; 343; 344; 347; 351; 353; 356; 359; 360; 361; 362; 363; 364; 371; 372; 374; 378; 380; 381; 382; 383; 384; 387; 388; 393; 397; 399; 402; 403; 408; 414; 415; 418; 420; 421; 422; 426; 428; 430; 433; 441; 446; 449; 457; 458; 460; 465; 471; 472; 473; 475; 476; 478; 480; 481; 482; 484; 485; 486; 490; 493; 494; 497; 501; 502; 504; 505; 509; 510; 514; 516; 520; 525; 526; 527; 528; 529; 530; 537; 538; 539; 541; 545; 546; 550; 559; 560; 561; 562; 564; 565; 571; 576; 577; 578; 580; 581; 584; 585; 586; 590; 591; 593; 594; 595; 596; 602; 607; 609; 612; 615; 624; 635; 639; 640; and 644.

8. The method of claim 1, wherein the predefined polynucleotide sequence sets are selected from the group consisting of:
38; 55; 66; 91; 93; 102; 103; 133; 142; 144; 153; 163; 190; 210; 232; 254; 280; 296; 300; 304; 311; 321; 335; 378; 383; 384; 420; 425; 429; 432; 468; 473; 487; 516; 519; 544; 553; 573; 577; 578; 585; 587; 589; 592; 605; 608; and 644,
and wherein differential expression of genes associated with lymph node metastases in colon cancer is detected.

9. The method of claim 8, wherein the predefined polynucleotide sequence sets are selected from the group consisting of:
55; 66; 144; 153; 432; 553; and 608.

10. The method of claim 8, wherein the predefined polynucleotide sequence sets are selected from the group consisting of:
38; 91; 93; 102; 103; 133; 142; 163; 190; 210; 232; 254; 280; 296; 300; 304; 311; 321; 335; 378; 383; 384; 420; 425; 429; 468; 473; 487; 516; 519; 544; 573; 577; 578; 585; 587; 589; 592; 605; and 644.

11. The method of claim 1, wherein the predefined polynucleotide sequence sets are selected from the group consisting of:
29; 48; 56; 62; 71; 77; 82; 109; 112; 135; 136; 154; 157; 166; 167; 186; 220; 226; 236; 237; 239; 240; 242; 244; 253; 260; 277; 290; 297; 348; 358; 375; 376; 404; 407; 412; 416; 424; 431; 450; 451; 452; 462; 474; 477; 479; 486; 498; 511; 521; 533; 534; 535; 542; 572; 619; and 622,
and wherein differential gene expression associated with MSI phenotype in colon cancer is detected.

12. The method of claim 11, wherein the predefined polynucleotide sequence sets are selected from the group consisting of:
48; 56; 62; 157; 186; 220; 226; 253; 260; 376; 450; 452; 462; 498; and 511.

13. The method of claim 11, wherein the predefined polynucleotide sequence sets are selected from the group consisting of:
29; 71; 77; 82; 109; 112; 135; 136; 154; 166; 167; 236; 237; 239; 240; 242; 244; 277; 290; 297; 348; 358; 375; 404; 407; 412; 416; 424; 431; 451; 474; 477; 479; 486; 521; 533; 534; 535; 542; 572; 619; and 622.

14. The method of claim 1, wherein the predefined polynucleotide sequence sets are selected from the group consisting of:
6; 19; 43; 49; 83; 89; 94; 100; 151; 168; 172; 177; 224; 252; 258; 265; 309; 315; 316; 320; 322; 328; 355; 365; 391; 443; 453; 455; 466; 483; 496; 499; 506; 512; 513; 515; 517; 531; 532; 554; 563; 575; 579; 606; 618; and 637,
and wherein differential gene expression associated with the location of a primary colorectal carcinoma in colon cancer is detected.

15. The method of claim 14, wherein the predefined polynucleotide sequence sets are selected from the group consisting of:
19; 43; 89; 94; 100; 168; 224; 309; 328; 355; 391; 466; 531; 532; 563; and 637.

16. The method of claim 14, wherein the predefined polynucleotide sequence sets are selected from the group consisting of:
6; 49; 83; 151; 172; 177; 252; 258; 265; 315; 316; 320; 322; 365; 443; 453; 455; 483; 496; 499; 506; 512; 513; 515; 517; 554; 575; 579; 606; and 618.

17. The method of claim 1, wherein the predefined polynucleotide sequence sets are selected from the group consisting of:
2; 3; 5; 7; 8; 10; 12; 14; 20; 22; 23; 26; 28; 32; 33; 35; 36; 41; 42; 44; 47; 50; 51; 60; 61; 63; 64; 70; 73; 74; 81; 92; 93; 95; 106; 115; 118; 120; 121; 123; 129; 130; 132; 133; 137; 145; 148; 149; 160; 161; 162; 163; 183; 187; 188; 195; 199; 200; 202; 206; 209; 211; 213; 214; 217; 219; 222; 228; 229; 230; 233; 234; 238; 245; 246; 247; 250; 257; 269; 271; 274; 275; 276; 282; 283; 284; 285; 289; 291; 292; 296; 302; 303; 304; 312; 314; 318; 323; 327; 333; 334; 335; 336; 337; 339; 340; 341; 342; 344; 345; 347; 350; 351; 356; 359; 361; 362; 363; 364; 367; 370; 373; 374; 378; 380; 381; 382; 383; 384; 387; 389; 402; 403; 408; 411; 414; 418; 420; 428; 430; 433; 435; 439; 444; 446; 447; 449; 456; 457; 458; 460; 461; 465; 473; 478; 482; 484; 489; 490; 491; 494; 497; 501; 502; 504; 510; 514; 516; 520; 523; 528; 529; 530; 536; 537; 538; 539; 540; 548; 551; 556; 561; 562; 570; 571; 580; 581; 582; 584; 586; 590; 591; 593; 594; 596; 603; 607; 609; 612; 615; 620; 624; 625; 628; 635; 639; and 640,
and wherein differential expression associated with the survival and death of subjects with colon cancer is detected.

18. The method of claim 17, wherein the predefined polynucleotide sequence sets are selected from the group consisting of:
5; 14; 36; 44; 61; 64; 70; 81; 95; 115; 121; 132; 183; 209; 228; 275; 333; 334; 350; 367; 373; 435; 439; 523; 570; 603; and 625.

19. The method of claim 17, wherein the predefined polynucleotide sequence sets are selected from the group consisting of:
2; 3; 7; 8; 10; 12; 20; 22; 23; 26; 28; 32; 33; 35; 41; 42; 47; 50; 51; 60; 63; 73; 74; 92; 93; 106; 118; 120; 123; 129; 130; 133; 137; 145; 148; 149; 160; 161; 162; 163; 187; 188; 195; 199; 200; 202; 206; 211; 213; 214; 217; 219; 222; 229; 230; 233; 234; 238; 245; 246; 247; 250; 257; 269; 271; 274; 276; 282; 283; 284; 285; 289; 291; 292; 296; 302; 303; 304; 312; 314; 318; 323; 327; 335; 336; 337; 339; 340; 341; 342; 344; 345; 347; 351; 356; 359; 361; 362; 363; 364; 370; 374; 378; 380; 381; 382; 383; 384; 387; 389; 402; 403; 408; 411; 414; 418; 420; 428; 430; 433; 444; 446; 447; 449; 456; 457; 458; 460; 461; 465; 473; 478; 482; 484; 489; 490; 491; 494; 497; 501; 502; 504; 510; 514; 516; 520; 528; 529; 530; 536; 537; 538; 539; 540; 548; 551; 556; 561; 562; 571; 580; 581; 582; 584; 586; 590; 591; 593; 594; 596; 607; 609; 612; 615; 620; 624; 628; 635; 639; and 640.

20. The method of claim 1, wherein the predefined polynucleotide sequence are 1; 4; 15; 21; 27; 58; 68; 75; 79; 95; 98; 101; 114; 119; 127; 131; 140; 155; 176; 192; 241; 243; 259; 263; 270; 279; 286; 298; 299; 307; 310; 312; 313; 317; 329; 346; 357; 360; 361; 394; 395; 398; 405; 406; 413; 427; 436; 437; 438; 443; 454; 464; 507; 522; 547; 552; 555; 568; 569; 614; 631; 634; 636; 641; and 644.

21. The method of claim 1 wherein the predefined polynucleotide sequence sets are 32; 33; 50; 133; 188; 217; 271; 284; 296; 303; 312; 323; 340; 343; 361; 403; 408; 473; 484; 494; 502; 516; and 624.

22. The method of claim 1, wherein the predefined polynucleotide sequence sets are 142; 144; 153; 190; 280; 468; 553; and 589.

23. The method of claim 1, wherein the predefined polynucleotide sequence sets are 29; 62; 71; 109; 136; 154; 348; 404; 412; 416; 431; 451; 479; 486; 498; 535 and 622.

24. The method of claim 1, wherein the predefined polynucleotide sequence sets are 109; 154; 412; 486; 535 and 622.

25. The method of claim 1, wherein the predefined polynucleotide sequence sets are 10; 12; 33; 214; 217; 271; 344; 383; 387; 414; 473; 484; 516; 536; and 561.

26. The method of claim 1, wherein the predefined polynucleotide sequence sets are 43; 100; 151; 172; 265; 315; 443; 499; 532 and 554.

27. The method of claim 1, wherein said detection of over expression or under expression of polynucleotide sequences is carried out by FISH or IHC.

28. The method of claim 1, wherein said detection is performed on nucleic acids from a tissue sample.

29. The method of claim 1, wherein said detection is performed on nucleic acids from a tumor cell line.

30. The method of claim 1, wherein said detection is performed on DNA microarrays.

31. A method or prognosis or diagnosis of colon cancer, or for monitoring the treatment of a subject with a colon cancer, comprising:
1) obtaining colon tissue polynucleotide sequences from a subject; and
2) analyzing the colon tissue polynucleotide sequences by detecting the overexpression or underexpression of a pool of polynucleotide sequences, said pool comprising all or part of the polynucleotide sequences, or subsequences or complements thereof, selected from each of predefined polynucleotide sequnce sets 1 through 644.

32. A method for differentiating a normal cell from a cancer cell, comprising:
1) obtaining polynucleotide sequences from normal and cancer cells; and
2) analyzing the polynucleotide sequences from step 1) by detecting the overexpression or underexpression of a pool of polynucleotide sequences, said pool comprising all or part of the polynucleotide sequences, or subsequences or complements thereof, selected from each of predefined polynucleotide sequnce sets 1 through 644.

33. A polynucleotide library, comprising a pool of polynucleotide sequences either overexpressed or underexpressed in colon tissue or cells, said pool corresponding to all or part of the polynucleotide sequences of SEQ ID Nos. 1 through 1596, or subsequences or complements thereof.

34. A polynucleotide library according to claim 33, immobilized on a solid support.

35. A polynucleotide library according to claim 34, wherein the solid support is selected from the group consisting of nylon membrane, nitrocellulose membrane, glass slide, glass beads, membranes on glass support and silicon chip.

36. A method of detecting differential gene expression, comprising:
1) obtaining a test sample comprising polynucleotide sequences from a subject,
2) reacting the test sample obtained in step (1) with a polynucleotide library according to claim 33, and
3) detecting the reaction product of step (2).

37. The method of claim 36, wherein the test sample is labeled before reaction step (2).

38. The method of claim 37, wherein the label is selected from the group consisting of radioactive, calorimetric, enzymatic, molecular amplification, bioluminescent and fluorescent labels.

39. The method of claim 36, further comprising:
4) obtaining a control sample comprising polynucleotide sequences;
5) reacting the control sample with said polynucleotide library;
6) detecting a control sample reaction product; and
7) comparing the amount of the test sample reaction product to the amount of the control sample reaction product.

40. The method of claim 36, wherein the test sample comprises cDNA, RNA or mRNA.

41. The method of claim 40, wherein mRNA is isolated from the test sample and cDNA is obtained by reverse transcription of said mRNA.

42. The method of claim 36, wherein said reaction step is performed by hybridizing the test sample with the polynucleotide library.

43. The method of claim 36, wherein conditions associated with colorectal cancer are detected, diagnosed, staged, classified, monitored, predicted, prevented or treated.

44. A method of assigning a therapeutic regimen to subject who has histopathological features of colorectal disease, comprising:
1) detecting the overexpression or underexpression of a pool of polynucleotide sequences from colon tissues, said pool comprising all or part of the polynucleotide sequences, or subsequences or complements thereof, selected from each of predefined polynucleotide sequence sets 1 through 644;
2) classifying said subject as having a “poor prognosis” or a “good prognosis” on the basis of the the overexpression or underexpression detected in step (1);
3) assigning said subject a therapeutic regimen, said therapeutic regimen (i) comprising no adjuvant chemotherapy if the patient is lymph node negative and is classified as having a good prognosis, or (ii) comprising chemotherapy if said patient has any other combination of lymph node status and expression profile.

45. The method of claim 44, wherein the assigning of a therapeutic regimen comprises the use of an appropriate dose of irinotecan.

46. The method of claim 45, wherein the dose of irinotecan is selected according to the presence or the absence of a polymorphism in a uridine diphosphate glucuronosyltransferase I (UGT1A1) gene promoter of the subject.

47. The method of claim 46, wherein the polymorphism is the presence of an abnormal number of (TA) repeats in the sequence of said promoter.

The application's sequence listing, which the Patent Office published only in electronic form, follows.

SEQUENCE LISTING (1596 sequences)

SEQ ID NO: 1 - DNA, 482 bp, Artificial Sequence
  Description of Artificial sequences:primer
  misc_feature (1)..(482): 3' terminal sequence from clone image:1012666. capping protein (actin filament), gelsolin-like(CAPG) gene.
tttgggaaagcacttgtctcctttattgaacatctgcagggggcacctctgcactgaccaggcagccagagaagcaagcaggcaggtggtggggggcaggggagcatggggcaggaagacgcccaccctcatttccagtccttgaaaaattgcttgaagatgggactctcatggccctgaggcagaatctccacctgagtgttcggggcgtactgcatgcgcgagatgaagccctcggccacctgcagggctgcctgccgctccttctcattcgcttttcgccccttccagatatagatcttgccacagagcccgttgtccagcacaaagcagtcatcagatatcagcagttcaagggcaaatgggctggagtcagccaccttggtcaggttcatctgtccagtggcatcagagaccttatacagagctgcggcctgggcatttgacttgtcagctgtgaggtcttcctcagggttgccctc

SEQ ID NO: 2 - DNA, 1221 bp, Artificial Sequence
  Description of Artificial sequences:primer
  misc_feature (1)..(1221): capping protein (actin filament), gelsolin-like(CAPG) gene.
cgcaggctggaaggaagacgaacctacgaagcagagatctgaagacagcatgtacacagccattccccagagtggctctccattcccaggctcagtgcaggatccaggcctgcatgtgtggcgggtggagaagctgaagccggtgcctgtggcgcaagagaaccagggcgtcttcttctcgggggactcctacctagtgctgcacaatggcccagaagaggtttcccatctgcacctgtggataggccagcagtcatcccgggatgagcagggggcctgtgccgtgctggctgtgcacctcaacacgctgctgggagagcggcctgtgcagcaccgcgaggtgcagggcaatgagtctgacctcttcatgagctacttcccacggggcctcaagtaccaggaaggtggtgtggagtcagcatttcacaagacctccacaggagccccagctgccatcaagaaactctaccaggtgaaggggaagaagaacatccgtgccaccgagcgggcactgaactgggacagcttcaacactggggactgcttcatcctggacctgggccagaacatcttcgcctggtgtggtggaaagtccaacatcctggaacgcaacaaggcgagggacctggccctggccatccgggacagtgagcgacagggcaaggcccaggtggagattgtcactgatggggaggagcctgctgagatgatccaggtcctgggccccaagcctgctctgaaggagggcaaccctgaggaagacctcacagctgacaaggcaaatgcccaggccgcagctctgtataaggtctctgatgccactggacagatgaacctgaccaaggtggctgactccagcccctttgcccttgaactgctgatatctgatgactgctttgtgctggacaacgggctctgtggcaagatctatatctggaaggggcgaaaagcgaatgagaaggagcggcaggcagccctgcaggtggccgagggcttcatctcgcgcatgcagtacgccccgaacactcaggtggagattctgcctcagggccgtgagagtcccatcttcaagcaatttttcaaggactggaaatgagggtgggcgtcttcctgccccatgctcccctgccccccaccacctgcctgcttgcttctctggctgcctggtcagtgcagaggtgccccctgcagatgttcaataaaggagacaagtgctttccc

SEQ ID NO: 3 - DNA, 465 bp, Artificial Sequence
  Description of Artificial sequences:primer
  misc_feature (1)..(465): 3' terminal sequence from clone image:1016390. dek oncogene (dna binding)(DEK) gene.
tagatttatttttattgacaaggtttataagaacaaatatttaaaatcgaaggccaattattaggtctcatttagttgcttattttgttcacttgtatttacctttccctagtgtctgagtaactatcaagaaacaaacctgtgaaaatacctgttaacattcaacatatatttttatatatttctgttctatgatgcaaagatatttttcaacacttaattggtgcaacaaatgtgtcattgtgtcataaacagcatgttttaaaattcagatttaataaactgatttaagacagtaaatttgaaagacaaaattaagtctcattcaggagtggtccattatgttgatcatctagaatcaacactgattaaccaaactctgaaagccaagagccccaactccagagaaacattaaatttctttaatgtaaaagtatattatttttgagacacactttgtcagag

SEQ ID NO: 4 - DNA, 2857 bp, Artificial Sequence
  Description of Artificial sequences:primer
  misc_feature (1)..(2857): dek oncogene (dna binding)(DEK) gene.
ttttgaaaatcttgttgattctggggagccgagcgcgcggcgcgagcgtcacgccagacagcggcccgcgcgccttctcctcggcgtcggccgccgccgcctcccagaacctcctcgtgccctcgcgtgccaggcccgcggcggccgaaatccgcggttcacagcatgtccgcctcggcccctgctgcggagggggagggaacccccacccagcccgcgtccgagaaagaacccgaaatgcccggtcccagagaggagagcgaggaggaagaggacgaggacgacgaggaggaggaggaggaggaaaaagaaaagagtctcatcgtggaaggcaagagggaaaagaaaaaagtagagaggttgacaatgcaagtctcttccttacagagagagccatttacaattgcacaaggaaaggggcagaaactttgtgaaattgagaggatacatttttttctaagtaagaagaaaaccgatgaacttagaaatctacacaaactgctttacaacaggccaggcactgtgtcctcattaaagaagaatgtgggtcagttcagtggctttccatttgaaaaaggaagtgtccaatataaaaagaaggaagaaatgttgaaaaaatttagaaatgccatgttaaagagcatctgtgaggttcttgatttggagagatcaggtgtaaatagtgaactagtgaagaggatcttgaatttcttaatgcatccaaagccttctggcaaaccattgccgaaatctaaaaaaacttgtagcaaaggcagtaaaaaggaacggaacagttctggaatggcaaggaaggctaagcgaaccaaatgtcctgaaattctgtcagatgaatctagtagtgatgaagatgaaaagaaaaacaaggaagagtcttcagatgatgaagataaagaaagtgaagaggagccaccaaaaaagacagccaaaagagaaaaacctaaacagaaagctacttctaaaagtaaaaaatctgtgaaaagtgccaatgttaagaaagcagatagcagcaccaccaagaagaatcaaaacagttccaaaaaagaaagtgagtctgaggatagttcagatgatgaacctttaattaaaaagttgaagaaaccccctacagatgaagagttaaaggaaacaataaagaaattactggccagtgctaacttggaagaagtcacaatgaaacagatttgcaaaaaggtctatgaaaattatcctacttatgatttaactgaaagaaaagatttcataaaaacaactgtaaaagagctaatttcttgagatagaggacagagaagatgactcgttcccatagatttgaagatctgatttataccattataccagcaaagagaatgtatttccttttctaaatccttgttaagcaacgttagtagaacttactgctgacctttttatcttgagtgttatgtgaatttgagtttgctgttttaaattgcatttctatgccatttttagtttaaaatcttgcatggcattaattgttccttgcttttatagttgtattttgtacattttggatttctttatataaggtcatagattcttgagctgttgtggtttttagtgcacttaatattagcttgcttaaggcatacttttaatcaagtagaacaaaaactattatcaccaggatttatacatacagagattgtagtatttagtatatgaaatattttgaatacacatctctgtcagtgtgaaaattcagcggcagtgtgtccatcatattaaaaatatacaagctacagttgtccagatcactgaattggaacttttctcctgcatgtgtatatatgtcaaattgtcagcatgacaaaagtgacagatgttatttttgtatttttaaaaaacaattggttgtatataaagtttttttatttcttttgtgcagatcactttttaaactcacataggtaggtatctttatagttgtagactatggaatgtcagtgttcagccaaacagtatgatggaacagtgaaagtcaattcagtgatggcaacactgaaggaacagttaccctgctttgcctcgaaagtgtcatcaatttgtaattttagtattaactctgtaaaagtgtctgtaggtacgttttatattatataaggacagaccaaaaatcaacctatcaaagcttcaaaaactttgggaaagggtgggattaagtacaagcacatttggcttacagtaaatgaactgatttttattaactgcttttgcccatataaaatgctgatatttactggaaacctagccagcttcacgattatgactaaagtaccagattataatgccagaatataatgtgcaggcaatcgtggatgtctctgacaaagtgtgtctcaaaaataatatacttttacattaaagaaatttaatgtttctctggagttggggctcttggctttcagagtttggttaatcagtgttgattctagatgatcaacataatggaccactcctgaatgagacttaattttgtctttcaaatttactgtcttaaatcagtttattaaatctgaattttaaaacatgctgtttatgacacaatgacacatttgttgcaccaattaagtgttgaaaaatatctttgcatcatagaacagaaatatataaaaatatatgttgaatgttaacaggtattttcacaggtttgtttcttgatagttactcagacactagggaaaggtaaatacaagtgaacaaaataagcaactaaatgagacctaataattggccttcgattttaaatatttgttcttataaaccttgtcaataaaaataaatctaaatcaaaaaaaaaaaaaaaaaaaaaaaaaaa

SEQ ID NO: 5 - DNA, 132 bp, Artificial Sequence
  Description of Artificial sequences:primer
  misc_feature (1)..(132): 3' terminal sequence from clone image:1030065. dishevelled, dsh homolog 1 (drosophila)(DVL1) gene.
ccacatggacgaggaggagacgccgtacctggtcaagctgcccgtggcccacgagcgcgtcacctggccgacttcaagaacgtgctcagcaaccggcccgtgcacgcctacaaattcttctttaagtccatg

SEQ ID NO: 6 - DNA, 2941 bp, Artificial Sequence
  Description of Artificial sequences:primer
  misc_feature (1)..(2941): dishevelled, dsh homolog 1 (drosophila)(DVL1) gene.
ccccgggccgggccctgagcgcgcgggctccgcgccgccgccgcgccatggcggagaccaagattatctaccacatggacgaggaggagacgccgtacctggtcaagctgcccgtggcccccgagcgcgtcacgctggccgacttcaagaacgtgctcagcaaccggcccgtgcacgcctacaaattcttctttaagtccatggaccaggacttcggggtggtgaaggaggagatctttgatgacaatgccaagcttccctgcttcaacggccgcgtggtctcctggctggtcctggctgagggtgctcactcggatgcggggtcccagggcacggacagccacacagacctgcccccgcctcttgagcggacaggcggcatcggggactcccggcccccctccttccacccaaatgtggccagcagccgtgacgggatggacaacgagacaggcacggagtccatggtcagtcaccggcgggagcgtgcccgacgccggaaccgcgaggaggccgcccggaccaatgggcacccaaggggagaccgacggcgggatgtggggctgcccccagacagcgcgtccaccgccctcagcagcgagcttgagtccagcagctttgtggactcggacgaggatggcagcacgagcaggctcagcagctccacggagcagagcacctcatccagactcatccggaagcacaaacgccggcggaggaagcagcgccttcggcaggcggaccgggcctcctccttcagcagcataaccgactccaccatgtccctcaacatcgtcactgtcacgctcaacatggaaagacatcactttctgggcatcagcatcgtggggcagagcaacgaccgtggagacggcggcatctacattggctccatcatgaagggcggggctgtggccgctgacggccgcatcgagcccggcgacatgttgctgcaggtgaatgacgtgaactttgagaacatgagcaatgacgatgccgtgcgggtgctgcgggagatcgtttcccagacggggcccatcagcctcactgtggccaagtgctgggacccaacgccccgaagctacttcaccgtcccacgggctgacccggtgcggcccatcgaccccgccgcctggctgtcccacacggcggcactgacaggagccctgccccgctacgagctggaagaggcgccgctgacggtgaagagtgacatgagcgccgtcgtccgggtcatgcagctgccagactcgggactggagatccgcgaccgcatgtggctcaagatcaccatcgccaatgccgtcatcggggcggacgtggtggactggctgtacacacacgtggagggcttcaaggagcggcgggaggcccggaagtacgccagcagcttgctgaagcacggcttcctgcggcacacggtcaacaagatcaccttctccgagcagtgctactacgtcttcggggatctctgcagcaatctcgccaccctgaacctcaacagtggctccagtgggacttcggatcaggacacgctggccccgctgccccacccggctgccccctggcctctgggtcagggctacccctaccagtacccgggacccccaccctgcttcccgcctgcctaccaggacccgggctttagctatggcagcggcagcaccgggagtcagcagagtgaagggagcaaaagcagtgggtccacccggagcagccgccgggccccgggccgtgagaaggagcgtcgggcggcgggagctgggggcagtggcagtgaatcggatcacacggcaccgagtggggtggggagcagctggcgagagcgtccggccggccagctcagccgtggcagcagcccacgcagtcaggcctcggctaccgccccggggctccccccgccccaccccacgaccaaggcctatacagtggtgggggggccacccgggggaccccctgtccgggagctggctgccgtccccccggaattgacaggcagccgccagtccttccagaaggctatggggaacccctgcgagttcttcgtggacatcatgtgactcgtggcgcatgccccagccctgcctgaggtggggagctggcggtcctgccgcatgcagagctcgcgtgggcttgccttcgtgggggccaggacgggaggcagggtggggggcaggctggaccaccaccatctgccctggcagcctggctgctccagctcctgacagcacctgtgtctgagcagccgtgttgggggcgctccctctctgcccctcagcgagagcctcggacctcccaaccccttgtgtctggtggggatccctcctgggatgaggaagaccccctcgggctctcggctgacccccacctcctgcacagctgtgcccaggcccccagggtggtccatgcggggcaaccccctgcggtgcacaggccccctgtctggagtagggatctaatttatttatttattgcctggccggtgactcgggggaggaggcgaccctgtcatctgtcccacctgctgctgccccttggagcagcctgcaccttctctcctcccatccggcaacagtctgaaagtacgtggaggacgggaccggaagacgagagagggctggacatcctgcccaccgtgtcccagccagggcagggagggaccatggcccgcagggtcaaggggccccgatgtgcacagctgccacagggagggaggtcttggggagatgggcagtcaggtggcccgtccttggtgagtgcacacactgcgcgcacacatcgcggccttcctggcttctctggcccccacgtgtctgtgctgtagatactgtatcaaagtcccagcgtttagatggttaacatagagctgcttctgtgtaaatgctgcttattttaaacactaaaaagcgtttaattttatgggaaaaaaaaaaaaaaaaaa

SEQ ID NO: 7 - DNA, 406 bp, Artificial Sequence
  Description of Artificial sequences:primer
  misc_feature (1)..(406): 3' terminal sequence from clone image:1046837. nephroblastoma overexpressed gene(NOV) gene.
ctcatttaattcataaattttaattttattttcagtaaacaacaatgttcaacttttatgcaccaaagtaatacagagtcacgcagcaataaaatcgtgtttatttagtgatatgacaagtagagaaatcaaacataatattttacaaaatgtacaatttatatttttataaatactttaaaagagagaagcgtaacacgtgtggtggcattaaaagaatgtctagatttaattttgcagcctaccttgtagcctgacaaaccagatacatgtatgtatacacatatatcttgatcatgagttttcataattatggcccaaggataagttttgggcatgtctacaataattccaaactctcataaaatgtgtggtctctcaccaccagtcatgttgattttgctct

SEQ ID NO: 8 - DNA, 2389 bp, Artificial Sequence
  Description of Artificial sequences:primer
  misc_feature (1)..(2389): nephroblastoma overexpressed gene(NOV) gene.
gggaaggcgagcagtgccaatctacagcgaagaaagtctcgtttggtaaaagcgagaggggaaagcctgagcatgcagagtgtgcagagcacgagcttttgtctccgaaagcagtgcctttgcctgaccttcctgcttctccatctcctgggacaggtcgctgcgactcagcgctgccctccccagtgcccgggccggtgccctgcgacgccgccgacctgcgcccccggggtgcgcgcggtgctggacggctgctcatgctgtctggtgtgtgcccgccagcgtggcgagagctgctcagatctggagccatgcgacgagagcagtggcctctactgtgatcgcagcgcggaccccagcaaccagactggcatctgcacggcggtagagggagataactgtgtgttcgatggggtcatctaccgcagtggagagaaatttcagccaagctgcaaattccagtgcacctgcagagatgggcagattggctgtgtgccccgctgtcagctggatgtgctactgcctgagcctaactgcccagctccaagaaaagttgaggtgcctggagagtgctgtgaaaagtggatctgtggcccagatgaggaggattcactgggaggccttacccttgcagcttacaggccagaagccaccctaggagtagaagtctctgactcaagtgtcaactgcattgaacagaccacagagtggacagcatgctccaagagctgtggtatggggttctccacccgggtcaccaataggaaccgtcaatgtgagatgctgaaacagactcggctctgcatggtgcggccctgtgaacaagagccagagcagccaacagataagaaaggaaaaaagtgtctccgcaccaagaagtcactcaaagccatccacctgcagttcaagaactgcaccagcctgcacacctacaagcccaggttctgtggggtctgcagtgatggccgctgctgcactccccacaataccaaaaccatccaggcagagtttcagtgctccccagggcaaatagtcaagaagccagtgatggtcattgggacctgcacctgtcacaccaactgtcctaagaacaatgaggccttcctccaggagctggagctgaagactaccagagggaaaatgtaacctatcactcaagaagcacacctacagagcacctgtagctgctgcgccacccaccatcaaaggaatataagaaaagtaatgaagaatcacgatttcatccttgaatcctatgtattttcctaatgtgatcatatgaggacctttcatatctgtcttttatttaacaaaaaatgtaattaactgtaaacttggaatcaaggtaagctcaggatatggcttaggaatgacttactttcctgtggttttattacaaatgcaaatttctataaatttaagaaaacaagtatataatttactttgtagactgtttcacattgcactcatcatattttgttgtgcactagtgcaattccaagaaaatatcactgtaatgagtcagtgaagtctagaatcatacttaacatttcattgtacaagtattacaaccatatattgaggttcattgggaagattctctattggctccctttttgggtaaaccagctctgaacttccaagctccaaatccaaggaaacatgcagctcttcaacatgacatccagagatgactattacttttctgtttagttttacactaggaaacgtgttgtatctacagtaatgaaatgtttactaagtggactggtgtcataaactttctccatttaagacacattgactcctttccaatagaaagaaactaaacagaaaactcccaatacaaagatgactggtccctcatagccctcagacatttatatattggaagctgctgaggcccccaagttttttaattaagcagaaacagcatattagcagggattctctcatctaactgatgagtaaactgaggcccaaagcacttgcttacatcctctgatagctgtttcaaatgtgcattttgtggaattttgagaaaaatagagcaaaatcaacatgactggtggtgagagaccacacattttatgagagtttggaattattgtagacatgcccaaaacttatccttgggccataattatgaaaactcatgatcaagatatatgtgtatacatacatgtatctggtttgtcaggctacaaggtaggctgcaaaattaaatctagacattcttttaatgccaccacacgtgttccgcttctctcttttaaagtatttataaaaatataaattgtacattttgtaaaatattatgtttgatttctctacttgtcatatcactaaataaacacgattttattgctgaaaaaaaaaaaaaaaaaaa

SEQ ID NO: 9 - DNA, 549 bp, Artificial Sequence
  Description of Artificial sequences:primer
  misc_feature (1)..(549): 3' terminal sequence from clone image:1056782. cd79a antigen (immunoglobulin-associated alpha)(CD79A) gene.
gcagttgggaagaatttattatcactaagtggccctgacagatcagggaggagggggtgacactaacgaggctgctacaatcagctcccctagaggcagcgattaagggctcattacccgctggggtgaggggagcctgggaaaggcagcggggcgcggggattaggttaggaggtggggcagtttagagggaagaagagtgggacacccccaggggagtccaaggaggcctggcctggagaagagtgaggttaccctcccaccccccactgggatagtatgactaaggaagcccccagaagggctgaaaggagaatgtcccagggaagtgagctgagacactggagctgggtgcacagcaggcgggggcagcctggcaggagtaggggtgtcacggcttctccagctggacatctcctatgttgaagctgcccacatcctggtaggtgccctggaagccccggtagatggtctcatacatggagcagtcgtccgggttcaggccttcataaaggttttcatcctcatattcatcccggcatccaaccc

SEQ ID NO: 10 - DNA, 1107 bp, Artificial Sequence
  Description of Artificial sequences:primer
  misc_feature (1)..(1107): cd79a antigen (immunoglobulin-associated alpha)(CD79A) gene.
tgctgcaactcaaactaaccaacccactgggagaagatgcctgggggtccaggagtcctccaagctctgcctgccaccatcttcctcctcttcctgctgtctgctgtctacctgggccctgggtgccaggccctgtggatgcacaaggtcccagcatcattgatggtgagcctgggggaagacgcccacttccaatgcccgcacaatagcagcaacaacgccaacgtcacctggtggcgcgtcctccatggcaactacacgtggccccctgagttcttgggcccgggcgaggaccccaatggtacgctgatcatccagaatgtgaacaagagccatgggggcatatacgtgtgccgggtccaggagggcaacgagtcataccagcagtcctgcggcacctacctccgcgtgcgccagccgccccccaggcccttcctggacatgggggagggcaccaagaaccgaatcatcacagccgaggggatcatcctcctgttctgcgcggtggtgcctgggacgctgctgctgttcaggaaacgatggcagaacgagaagctcgggttggatgccggggatgaatatgaagatgaaaacctttatgaaggcctgaacctggacgactgctccatgtatgaggacatctcccggggcctccagggcacctaccaggatgtgggcagcctcaacataggagatgtccagctggagaagccgtgacacccctactcctgccaggctgcccccgcctgctgtgcacccagctccagtgtctcagctcacttccctgggacattctcctttcagcccttctgggggcttccttagtcatattcccccagtggggggtgggagggtaacctcactcttctccaggccaggcctccttggactcccctgggggtgtcccactcttcttccctctaaactgccccacctcctaacctaatccccacgccccgctgcctttcccaggctcccctcacccagcgggtaatgagcccttaatcgctgcctctaggggagctgattgtagcagcctcgttagtgtcaccccctcctccctgatctgtcagggccacttagtgataataaattcttcccaactgc

SEQ ID NO: 11 - DNA, 440 bp, Artificial Sequence
  Description of Artificial sequences:primer
  misc_feature (1)..(440): 3' terminal sequence from clone image:108249. hypothetical protein mgc27076(MGC27076) gene.
  misc_feature (6)..(6): n is a, c, g, or t
  misc_feature (419)..(419): n is a, c, g, or t
  misc_feature (433)..(433): n is a, c, g, or t
acaggncgaaaacagaaaaattcagggaattcaatatcccagcaaaagcctttatgagatgtatgccacgtattataattcctaaaaccacgattgaaatctgtcattgttactggcctccaaggttgctttttctcacaccttactcctcccaaagcagccactgtgcttacaagtgtgcctccagaaacagaagacaccagtcagtttacgaccacttccatctcacccttcaaaaggaatgggactgcactctctaagactcacttgggagaggggaagttgggtgaaagttgccgctgggtaaaggtaaaacagggactgggatttggtcaaaaaccacccccaggcttacccttaatgccccgggggaacacttactattctcaggaggttatggttggtatcaaaaacatctnggcatttttagggntctgggg

SEQ ID NO: 12 - DNA, 408 bp, Artificial Sequence
  Description of Artificial sequences:primer
  misc_feature (1)..(408): 5' terminal sequence from clone image:108249. hypothetical protein mgc27076(MGC27076) gene.
  misc_feature (92)..(92): n is a, c, g, or t
  misc_feature (117)..(117): n is a, c, g, or t
  misc_feature (331)..(331): n is a, c, g, or t
  misc_feature (346)..(346): n is a, c, g, or t
  misc_feature (352)..(352): n is a, c, g, or t
  misc_feature (385)..(385): n is a, c, g, or t
  misc_feature (405)..(405): n is a, c, g, or t
gagaatataagaaagtatttgctgactgaagccagagaaaaaaatagacctgaatttcttcagggttggcagactgctgttacgaagtgtanttccacaacagaaaaacgacagtanctgtggagtctttgtgctccagtactgcaagtgcctcgccttagagcagcctttccagttttcacaagaagacatgccccgagtgcggaagaggatttacaaggagctatgtgagtgccggctcatggactgaaactcagcagggactctggggaagtctgaccaagttgggagcagatggtttgttacttggaatctccaaacattagttganttttacagatatttncaggtncagtgggtgttggggccactatttgtttacctncaatttatttttttgccctnttt

SEQ ID NO: 13 - DNA, 2793 bp, Artificial Sequence
  Description of Artificial sequences:primer
  misc_feature (1)..(2793): hypothetical protein mgc27076(MGC27076) gene.
agcgggcggtagccacttcagaggaagctcggcggctgtggccgcggcgaacaggccggacgcctcgtcgctggcgggcttcccttggagctgacgaaggcggggtccgcggtccaggctgctgccgcgacggggccggcggcggggcagctgccaggaacgagggtagcagctgcatccagatctcattatgcatcagaaaaatgaaaaaacagaggaaaattctatggaggaaaggaatccacttagccttttctgagaaatggaatactgggtttggaggctttaagaagttttattttcaccaacacttgtgcattctgaaagctaagctgggaaggccagttacttggaatagacagttgagacatttccagggtagaaagaaagctcttcaaatccagaaaacgtggatcaaggatgaacacctttgtgctaagaccaagttcaatgtggctactcaaaatgttagtactttgtcctctaaagtgaaaagaaaggacgctaaacacttcatttcctcctcaaagactctcctgagactccaagcagagaagctgttgtcatcagcaaagaattctgaccatgaatactgcagagagaaaaatctcttgaaggcagttactgactttccatcaaatagtgctttaggtcaggccaatggtcacagacctaggacagacccacaaccttctgactttcccatgaagttcaatggggagagccaaagtccaggtgagagtggcacgattgtggtcaccttgaacaaccataagagaaagggcttttgttacggctgctgccaagggccggagcaccacaggaatgggggacccttgattccaaaaaagttccaacttaaccaacatagaaggataaaattatctcctcttatgatgtatgagaaattatccatgattagatttcggtacaggattctcagatcccagcacttcagaaccaaaagcaaggtttgcaagctaagaaaagcccagcgaagctgggtacagaaagtcactggggaccatcaagagacccgtagggagaacggtgagggtggcagttgcagcccatttccttccccagaacctaaagacccttcttgtcggcatcagccgtactttccagatatggacagcagtgctgtggtgaaggggacgaactctcatgtgcctgattgccacactaaaggaagctctttcttgggcaaggagcttagtttagacgaagcattccctgaccaacagaatggcagtgccacaaacgcctgggaccagtcatcctgttcttctcctaagtgggagtgtacagagctgattcatgacatccccttaccagaacatcgttctaataccatgttcatttcagaaactgaaagagaaattatgactctgggtcaggaaaatcagacaagttctgtcagtgatgacagagtaaaactgtcagtgtctggagcagatacatctgtgagtagcgtagatgggcctgtgtcccaaaaggctgttcaaaatgagaactcataccagatggaggaggatggatctctcaagcagagcattcttagttctgagttgctggaccacccttactgtaaaagtccactggaggctcccttggtgtgcagtggactcaaactagaaaatcaagtaggaggtggaaagaacagtcagaaagcctctccagtggatgatgaacagctgtcagtctgtctttctggattcctagatgaggttatgaagaagtatggcagtttggttccactcagtgaaaaagaagtccttggaagattaaaagatgtctttaatgaagacttttctaatagaaaaccatttatcaatagggaaataacaaactatcgggccagacatcaaaaatgtaacttccgtatcttctataataaacacatgctggatatggacgacctggcgactctggatggtcagaactggctgaatgaccaggtcattaatatgtatggtgagctgataatggatgcagtcccagacaaagttcacttcttcaacagcttttttcatagacagctggtaaccaaaggatataatggagtaaaaagatggactaaaaaggtggatttgtttaaaaagagtcttctgttgattcctattcacctggaagtccactggtctctcattactgtgacactctctaatcgaattatttcattttatgattcccaaggcattcattttaagttttgtgtagagaatataagaaagtatttgctgactgaagccagagaaaaaaatagacctgaatttcttcagggttggcagactgctgttacgaagtgtattccacaacagaaaaacgacagtgactgtggagtctttgtgctccagtactgcaagtgcctcgccttagagcagcctttccagttttcacaagaagacatgccccgagtgcggaagaggatttacaaggagctatgtgagtgccggctcatggactgaaactcagcagggactctgggaagtctgaccaagttggagcagatggtttgttacttgaatctccaaacacttagttgaatttttacagatatttcagatcagtggtgttgggccactattgttacctcaaatttattttttgcccttattcatttctccagctaccatgtactattgtttaatgttcagtttggtttcatttttaattttatggttctgtgcgtcccccatatttaatatttattattcaaacgcatgcatatagacagagcatgcagtgaagagtattaaaaaaaaaagcttagcaaaaaaaaaaaaaaaa

SEQ ID NO: 14 - DNA, 398 bp, Artificial Sequence
  Description of Artificial sequences:primer
  misc_feature (1)..(398): 3' terminal sequence from clone image:108274.
  misc_feature (73)..(73): n is a, c, g, or t
  misc_feature (131)..(131): n is a, c, g, or t
  misc_feature (139)..(139): n is a, c, g, or t
  misc_feature (142)..(142): n is a, c, g, or t
  misc_feature (204)..(204): n is a, c, g, or t
  misc_feature (210)..(210): n is a, c, g, or t
  misc_feature (218)..(218): n is a, c, g, or t
  misc_feature (256)..(256): n is a, c, g, or t
  misc_feature (267)..(267): n is a, c, g, or t
  misc_feature (273)..(273): n is a, c, g, or t
  misc_feature (280)..(280): n is a, c, g, or t
  misc_feature (286)..(286): n is a, c, g, or t
  misc_feature (294)..(294): n is a, c, g, or t
  misc_feature (318)..(318): n is a, c, g, or t
  misc_feature (327)..(327): n is a, c, g, or t
  misc_feature (357)..(357): n is a, c, g, or t
  misc_feature (383)..(383): n is a, c, g, or t
cagaaacagcacacaaacatccctgccactccttagtccctgcacggattgtacgagccggagctcagctttnagtgtggacaaatcccaggggctctctgagttggaacaagaactgagtcatggggganagccagcnagngcagtctgggtccaaggggccagggaagagaagtggtgctcgtggggtgaagggagcctggnccaganaccccgangggcagacggctctcgttcatgttggagttggcacttnagttgctagtngtagcngcagggntaccancgctggtnttgatgccgaggttaatattcttncataggtcngggacagagagcacatcctcaccatacttnagtttagattcagggaaagaacccantttcagagctacttg

SEQ ID NO: 15 - DNA, 162 bp, Artificial Sequence
  Description of Artificial sequences:primer
  misc_feature (1)..(162): 3' terminal sequence from clone image:108292.
  misc_feature (8)..(8): n is a, c, g, or t
  misc_feature (25)..(25): n is a, c, g, or t
  misc_feature (78)..(78): n is a, c, g, or t
  misc_feature (83)..(83): n is a, c, g, or t
  misc_feature (93)..(93): n is a, c, g, or t
gacaactncattgacaaaactggancccccctcagtggcagcagttccacatcgcgggcccctgctgggagaggcagntccantggccacagnaggacaggctcctccttccctgaataaggcagcatgacatttgcttcattcatctttggtaaaggacag

SEQ ID NO: 16 - DNA, 287 bp, Artificial Sequence
  Description of Artificial sequences:primer
  misc_feature (1)..(287): 3' terminal sequence from clone image:108305. chromosome 1 open reading frame 28(C1ORF28) gene.
  misc_feature (8)..(8): n is a, c, g, or t
  misc_feature (167)..(167): n is a, c, g, or t
  misc_feature (172)..(172): n is a, c, g, or t
  misc_feature (182)..(182): n is a, c, g, or t
  misc_feature (189)..(189): n is a, c, g, or t
tgtgtttngagatttttttcaaatggaaagatattacagatagaaacacatcattctaggtttcaaaatcaccaaagtcagtgagaagaatgtacattcatttaaatgtaatcatttgtaaataaagaaatcttgaaaaggctgaacagttcaatcaaattgaaganttganctagattttncattatnctttttaaataatgagtaagtgtagatatagtgtacatacaagttgacattctgattcattcaaaatagtcacatccctttgcttgggttttgggatg

SEQ ID NO: 17 - DNA, 188 bp, Artificial Sequence
  Description of Artificial sequences:primer
  misc_feature (1)..(188): 5' terminal sequence from clone image:108305. chromosome 1 open reading frame 28(C1ORF28) gene.
  misc_feature (158)..(158): n is a, c, g, or t
  misc_feature (167)..(167): n is a, c, g, or t
aaatgaaactctaatacaaagaagaaaagaccagatgcaaccagggggcactgcaattagtgttacagtaccttatagagtagtagaccagccccttaaacttatgcctcaagactgggaccgcgttgtagccgtttttgtgcagggtcctcatggcntttcaaagnttggccatggttttcctatgg

SEQ ID NO: 18 - DNA, 2318 bp, Artificial Sequence
  Description of Artificial sequences:primer
  misc_feature (1)..(2318): chromosome 1 open reading frame 28(C1ORF28) gene.
gggggaagatggcggacgtgcttagcgtcctgcgacagtacaacatccagaagaaggagattgtggtgaagggagacgaagtgatcttcggggagttctcctggcccaagaatgtgaagaccaactatgttgtttgggggactggaaaggaaggccaacccagagagtactacacattggattccattttatttctacttaataacgtgcacctttctcatcctgtttatgtccgacgtgcagctactgaaaatattcctgtggttagaagacctgatcgaaaagatctacttggatatctcaatggtgaagcgtcaacatcggcaagtatagacagaagcgctcccttagaaataggtcttcagcgatctactcaagtcaaacgagctgcagatgaagttttagcagaagcaaagaaaccacgaattgaggatgaagagtgtgtgcgccttgataaagagagattggctgcccgtttggagggtcacaaagaagggattgtacagactgaacagattaggtctttgtctgaagctatgtcagtggaaaaaattgctgcaatcaaagccaaaattatggctaagaaaagatctactatcaagactgatctagatgatgacataactgcccttaaacagaggagttttgtggatgctgaggtagatgtgacccgagatattgtcagcagagagagagtatggaggacacgaacaactatcttacaaagcacaggaaagaatttttccaagaacatttttgcaattcttcaatctgtaaaagccagagaagaagggcgtgcacctgaacagcgacctgccccaaatgcagcacctgtggatcccactttgcgcaccaaacagcctatcccagctgcctataacagatacgatcaggaaagattcaaaggaaaagaagaaacggaaggcttcaaaattgacactatgggaacctaccatggtatgacactgaaatctgtaacggagggtrcatctgcccggaagactcagactcctgcagcccagccagtaccaagaccagtttctcaagcaagacctcccccaaatcagaagaaaggatctcgaacacccattatcataattcctgcagctaccacctctttaataaccatgcttaatgcaaaagaccttctacaggacctgaaatttgtcccatcagatgaaaagaagaaacaaggttgtcaacgagaaaatgaaactctaatacaaagaagaaaagaccagatgcaaccagggggcactgcaattagtgttacagtaccttatagagtagtagaccagccccttaaacttatgcctcaagactgggaccgcgttgtagccgtttttgtgcagggtcctgcatggcagttcaaaggttggccatggcttttgcctgatggatcaccagttgatatatttgctaaaattaaagccttccatctgaagtatgatgaagttcgtctggatccaaatgttcagaaatgggatgtaacagtattagaactcagctatcacaaacgtcatttggatagaccagtgttcttacggttttgggaaacattggacaggtacatggtaaagcataaatcgcacttgagattctgaattatttggctcctccatttctggaaattgagactcaagctttatgaatttatcaagaacttaaaaatgaagaaggtcacagattgatcttttataagaccttatttgatgctttgtgcttcaaggagatgatacctgtcatccatataagcaaactttttggcttacaactatttttttaatattagccttctagtctgtaatggaaattgtatattttgatagaagttttttctccattggttaaattagcattacttaaaatttgtttctttagaaaataaatgcaggttataaatgtgtgtatatttagagattataaggctctctgagccatcttctgatttttcattgctctataattctttttactgaaaatactatgttatgaatggtattaaattttagtctctggaacatccaaaaccaagcaaagggatgtgactattttgaatgaatcagaatgtcaacttgtatgtacactatatctacacttactcattatttaaaaagaataatgaaaaatctagatcaattcttcaatttgattgaactgttcagccttttcaagatttctttatttacaaatgattacatttaaatgaatgtacattcttctcactgactttggtgattttgaaacctagaatgatgtgtttctatctgtaatatctttccatttgaaaaaaatctcaaaacacagattaaaaccac

SEQ ID NO: 19 - DNA, 419 bp, Artificial Sequence
  Description of Artificial sequences:primer
  misc_feature (1)..(419): 3' terminal sequence from clone image:108370. mitogen-activated protein kinase kinase 2(MAP2K2) gene.
  misc_feature (3)..(3): n is a, c, g, or t
  misc_feature (10)..(10): n is a, c, g, or t
  misc_feature (17)..(17): n is a, c, g, or t
  misc_feature (31)..(31): n is a, c, g, or t
  misc_feature (40)..(40): n is a, c, g, or t
  misc_feature (43)..(44): n is a, c, g, or t
  misc_feature (54)..(54): n is a, c, g, or t
  misc_feature (76)..(76): n is a, c, g, or t
  misc_feature (144)..(144): n is a, c, g, or t
  misc_feature (204)..(204): n is a, c, g, or t
  misc_feature (295)..(295): n is a, c, g, or t
  misc_feature (309)..(309): n is a, c, g, or t
  misc_feature (407)..(407): n is a, c, g, or t
ggngctcccnctgctcnaggtcacgttccgncagtcaaanggnnaggaaggatntggagcctttgtggctgagganccctctgtatgtggtgctcctattctcctcctcgtcttctcgtcttcccctcctcctcgcgccggagnaccctcgctactcaggagttctgtccatcctcgttttgtgtggctgactcagttctcgangccccttcctcccatgcagaaaggggacaagtgtggcaacccgcccccaacctctattcttggtgaatttaaaatgggggttccaagagtnggtgctggcaccangggggacaccacacaagaccaccagggttgcaaggaggggagacacaaggccgttctgtctgtgttattggagttcaacctttaaaagttccgaggtngtttaagcaggg

SEQ ID NO: 20 - DNA, 272 bp, Artificial Sequence
  Description of Artificial sequences:primer
  misc_feature (1)..(272): 5' terminal sequence from clone image:108370. mitogen-activated protein kinase kinase 2(MAP2K2) gene.
  misc_feature (22)..(22): n is a, c, g, or t
  misc_feature (68)..(68): n is a, c, g, or t
  misc_feature (165)..(165): n is a, c, g, or t
  misc_feature (177)..(177): n is a, c, g, or t
  misc_feature (188)..(188): n is a, c, g, or t
agccaagccagaatagtctcgntctcctgaactcgcctcggcctcccaaagtgctgggattacaggtntgagccaccgcccctggctagaccacctcggaacttttaaagggtgcactccataacacagacagcacggcctgtgttctccctcctgcagccggtngtctgtgtggtntccccggggtnccagcaccacttctgggaacccccattttaaattcaccaagaatagaggttgggggcgggttgccacactgtccccttttctgc

SEQ ID NO: 21 - DNA, 1759 bp, Artificial Sequence
  Description of Artificial sequences:primer
  misc_feature (1)..(1759): mitogen-activated protein kinase kinase 2(MAP2K2) gene.
cccctgcctctcggactcgggctgcggcgtcagccttcttcgggcctcggcagcggtagcggctcgctcgcctcagccccagcgcccctcggctaccctcggcccaggcccgcagcgccgcccgccctcggccgccccgacgccggcctgggccgcggccgcagccccgggctcgcgtaggcgccgaccgctcccggcccgccccctatgggccccggctagaggcgccgccgccgccggcccgcggagccccgatgctggcccggaggaagccggtgctgccggcgctcaccatcaaccctaccatcgccgagggcccatcccctaccagcgagggcgcctccgaggcaaacctggtggacctgcagaagaagctggaggagctggaacttgacgagcagcagaagaagcggctggaagcctttctcacccagaaagccaaggtcggcgaactcaaagacgatgacttcgaaaggatctcagagctgggcgcgggcaacggcggggtggtcaccaaagtccagcacagaccctcgggcctcatcatggccaggaagctgatccaccttgagatcaagccggccatccggaaccagatcatccgcgagctgcaggtcctgcacgaatgcaactcgccgtacatcgtgggcttctacggggccttctacagtgacggggagatcagcatttgcatggaacacatggacggcggctccctggaccaggtgctgaaagaggccaagaggattcccgaggagatcctggggaaagtcagcatcgcggttctccggggcttggcgtacctccgagagaagcaccagatcatgcaccgagatgtgaagccctccaacatcctcgtgaactctagaggggagatcaagctgtgtgacttcggggtgagcggccagctcatagactccatggccaactccttcgtgggcacgcgctcctacatggctccggagcggttgcagggcacacattactcggtgcagtcggacatctggagcatgggcctgtccctggtggagctggccgtcggaaggtaccccatccccccgcccgacgccaaagagctggaggccatctttggccggcccgtggtcgacggggaagaaggagagcctcacagcatctcgcctcggccgaggccccccgggcgccccgtcagcggtcacgggatggatagccggcctgccatggccatctttgaactcctggactatattgtgaacgagccacctcctaagctgcccaacggtgtgttcacccccgacttccaggagtttgtcaataaatgcctcatcaagaacccagcggagcgggcggacctgaagatgctcacaaaccacaccttcatcaagcggtccgaggtggaagaagtggattttgccggctggttgtgtaaaaccctgcggctgaaccagcccggcacacccacgcgcaccgccgtgtgacagtggccgggctccctgcgtcccgctggtgacctgcccaccgtccctgtccatgccccgcccttccagctgaggacaggctggcgcctccacccaccctcctgcctcacccctgcggagagcaccgtggcggggcgacagcgcatgcaggaacgggggtctcctctcctgcccgtcctggccggggtgcctctggggacgggcgacgctgctgtgtgtggtctcagaggctctgcttccttaggttacaaaacaaaacagggagagaaaaagcaaaaaaaaaaaaaaaaaaaaaaaaaaaa

SEQ ID NO: 22 - DNA, 224 bp, Artificial Sequence
  Description of Artificial sequences:primer
  misc_feature (1)..(224): 5' terminal sequence from clone image:108374. hypothetical protein loc220115(LOC220115) gene.
  misc_feature (2)..(2): n is a, c, g, or t
  misc_feature (63)..(63): n is a, c, g, or t
  misc_feature (92)..(92): n is a, c, g, or t
  misc_feature (156)..(156): n is a, c, g, or t
  misc_feature (216)..(216): n is a, c, g, or t
tntagcatagggacttgtttacattttattatcattattagtaataaaccaataaaaactgantaacaaaggaaaaagctcaagataaatantttcttccttgtgaattcaaacacatgcacacacacacatcctcctctgtgtgtgttacttccncctcacattctgtcctacggtacaaatagttacacaaaagtctacaaaacgcgagtagcngaccccag

SEQ ID NO: 23 - DNA, 446 bp, Artificial Sequence
  Description of Artificial sequences:primer
  misc_feature (1)..(446): 3' terminal sequence from clone image:108399.
  misc_feature (24)..(25): n is a, c, g, or t
  misc_feature (27)..(28): n is a, c, g, or t
  misc_feature (34)..(34): n is a, c, g, or t
  misc_feature (70)..(70): n is a, c, g, or t
  misc_feature (90)..(90): n is a, c, g, or t
  misc_feature (233)..(233): n is a, c, g, or t
  misc_feature (286)..(286): n is a, c, g, or t
  misc_feature (288)..(288): n is a, c, g, or t
  misc_feature (323)..(323): n is a, c, g, or t
  misc_feature (385)..(385): n is a, c, g, or t
  misc_feature (418)..(418): n is a, c, g, or t
cttacttcaaagtaaatttctctnngnngcttcnactctactgggaatggtggtaaatggtggtggacanattatctgttaaagatagtnaattacatattttttagcttccaacaagtatattacaccattgttttgtctttctgtcaccaaacaccaaatgtattacaagcaaaatattcctataccacccgttcacattttaccaataagagatgattgatttcatcaangtatctttgaattgtttggagggtgtctttgcaaaccggataattattttggngnccctgaaatctctaaacatcatttttatttcaagnaactttaaagagtatatgatccataacacttcaaacttcttttggaggggaaatattctttncatgtgggcaggagtatggctcatgtttaaggncaggtttccatatttggcttcccgggcc

SEQ ID NO: 24 - DNA, 317 bp, Artificial Sequence
  Description of Artificial sequences:primer
  misc_feature (1)..(317): 3' terminal sequence from clone image:108490. hiv-1 rev binding protein(HRB) gene.
  misc_feature (120)..(120): n is a, c, g, or t
  misc_feature (128)..(128): n is a, c, g, or t
  misc_feature (185)..(185): n is a, c, g, or t
  misc_feature (193)..(193): n is a, c, g, or t
  misc_feature (207)..(207): n is a, c, g, or t
  misc_feature (249)..(249): n is a, c, g, or t
  misc_feature (282)..(282): n is a, c, g, or t
  misc_feature (305)..(305): n is a, c, g, or t
tttttttcacctgcaaactgtagcaaaacatgatcagctttattatgcagacaggtatccctctacattttaaaagaatttaggcatgtataaatagaagagctctttagaaaggaaaanttcaagantgaataaaaccttccaattttgactctgttactttccagtagcaatggttaaaatgnttttaggncattcattccaagntatatgacagcaccttaaaagtggctgatctatttccccagnaacatttctcacataacaatgtggttaacgttncaactactgcatatgcacaaatnggctaatttcta

SEQ ID NO: 25 - DNA, 2584 bp, Artificial Sequence
  Description of Artificial sequences:primer
  misc_feature (1)..(2584): hiv-1 rev binding protein(HRB) gene.
tggcggcggcggcggcggttgtcccggctgtgccggttggtgtggcccgtcagcccgcgtaccacagcgcccgggccgcgtcgagcccagtacagccaagccgctgcggccgggtccggcgcgggcggcgcgcgcagacggagggcggcggccgcggccagggcggcccgtgggaccgcgggcccccggcgcagcgctgcccggctcccggccctgccggcctcctcccttggcgccgcggccatggcggccagcgcgaagcggaagcaggaggagaagcacctgaagatgctgcgggacatgaccggcctcccgcgcaaccgaaagtgcttcgactgcgaccagcgcggccccacctacgttaacatgacggtcggctccttcgtgtgtacctcctgctccggcagcctgcgaggattaaatccaccacacagggtgaaatctatctccatgacaacattcacacaacaggaaattgaattcttacaaaaacatggaaatgaagtctgtaaacagatttggctaggattatttgatgatagatcttcagcaattccagacttcagggatccacaaaaagtgaaagagtttctacaagaaaagtatgaaaagaaaagatggtatgtcccgccagaacaagccaaagtcgtggcatcagttcatgcatctatttcagggtcctctgccagtagcacaagcagcacacctgaggtcaaaccactgaaatctcttttaggggattctgcaccaacactgcacttaaataagggcacacctagtcagtccccagttgtaggtcgttctcaagggcagcagcaggagaagaagcaatttgaccttttaagtgatctcggctcagacatctttgctgctccagctcctcagtcaacagctacagccaattttgctaactttgcacatttcaacagtcatgcagctcagaattctgcaaatgcagattttgcaaactttgatgcatttggacagtctagtggttcgagtaattttggaggtttccccacagcaagtcactctccttttcagccccaaactacaggtggaagtgctgcatcagtaaatgctaattttgctcattttgataacttccccaaatcctccagtgctgattttggaaccttcaatacttcccagagtcatcaaacagcatcagctgttagtaaagtttcaacgaacaaagctggtttacagactgcagacaaatatgcagcacttgctaatttagacaatatcttcagtgccgggcaaggtggtgatcagggaagtggctttgggaccacaggtaaagctcctgttggttctgtggtttcagttcccagtcagtcaagtgcatcttcagacaagtatgcagctctggcagaactagacagcgttttcagttctgcagccacctccagtaatgcgtatacttccacaagtaatgctagcagcaatgtttttggaacagtgccagtggttgcttctgcacagacacagcctgcttcatcaagtgtgcctgctccatttggacgtacgccttccacaaatccatttgttgctgctgctggtccttctgtggcatcttctacaaacccatttcagaccaatgccagaggagcaacagcggcaacctttggcactgcatccatgagcatgcccacgggattcggcactcctgctccctacagtcttcccaccagctttagtggcagctttcagcagcctgcctttccagcccaagcagctttccctcaacagacagctttttctcaacagcccaatggtgcaggttttgcagcatttggacaaacaaagccagtagtaaccccttttggtcaagttgcagctgctggagtatctagtaatccttttatgactggtgcaccaacaggacaatttccaacaggaagctcatcaaccaatcctttcttatagccttatatagacaatttactggaacgaacttttatgtggtcacattacatctctccacctcttgcactgttgtcttgtttcactgatcttagctttaaacacaagagaagtctttaaaaagcctgcattgtgtattaaacaccaggtaatatgtgcaaaaccgagggctccagtaacaccttctaacctgtgaattggcagaaaagggtagcggtatcatgtatattaaaattggctaatattaagttattgcagataccacattcattatgctgcagtactgtacatatttttcttagaaattagctatttgtgcatatcagtatttgtaactttaacacattgttatgtgagaaatgttactggggaaatagatcagccacttttaaggtgctgtcatatatcttggaatgaatgacctaaaatcattttaaccattgctactggaaagtaacagagtcaaaattggaaggttttattcattcttgaatttttcctttctaaagagctcttctatttatacatgcctaaattcttttaaaatgtagagggatacctgtctgcataataaagctgatcatgttttgctacagtttgcaggtgaaaaaaaataaatattataaaataaaaaaaaaaaaaaagaaaaaaaaaa

SEQ ID NO: 26 - DNA, 329 bp, Artificial Sequence
  Description of Artificial sequences:primer
  misc_feature (1)..(329): 3' terminal sequence from clone image:110385. hypothetical gene supported by ak026041.
  misc_feature (54)..(54): n is a, c, g, or t
  misc_feature (84)..(84): n is a, c, g, or t
  misc_feature (277)..(277): n is a, c, g, or t
  misc_feature (294)..(294): n is a, c, g, or t
ttccagagcctttatttgcaaatcccaactttccagactatccccaaaggaacngttctttctttctcttgttttctgcttganccaaggggcagcctcgccttcaatgcagtccagctgagtgaagctaaggtattttctgagccaacaaagatgatttcaggctctatggctcgaggcatttccctggatgaaataacacttcaaaaagacttaaggccacttgtgtctctctcttaggccacagactttcagtaattccaagagcaaagctccnttatacaaggacacagncagtacgggagccttggaagccagggctggctgcc

SEQ ID NO: 27 - DNA, 407 bp, Artificial Sequence
  Description of Artificial sequences:primer
  misc_feature (1)..(407): 5' terminal sequence from clone image:110385. hypothetical gene supported by ak026041.
  misc_feature (181)..(181): n is a, c, g, or t
  misc_feature (363)..(363): n is a, c, g, or t
  misc_feature (387)..(387): n is a, c, g, or t
  misc_feature (395)..(395): n is a, c, g, or t
ggggctccccagaggtcacacagcctgtgtgcagtggagctggcaccattcagactttcagccgactcagcaactttcccttgccctgggctgcctcctcctgagagctgttccccaccgccctgcctcttccggttggaggctctcatgtctctttggggagagctggcagtgtgcggantgataacattttcccaatattgagcagttcccaaggacagtcagcatttctagacttccacaaaattatgctggcatttggctgggagcccggtgttcagtgggtttcctggcccgaggtcggttgcagccccatcttaccacatctttcatgtgggacattgaggatttcacatgctgggntcctgaaggggtgttcaagttttnctttgggngaattaaggggt

SEQ ID NO: 28 - DNA, 268 bp, Artificial Sequence
  Description of Artificial sequences:primer
  misc_feature (1)..(268): 3' terminal sequence from clone image:110486. hypothetical protein bc008217(LOC92906) gene.
  misc_feature (15)..(15): n is a, c, g, or t
  misc_feature (22)..(22): n is a, c, g, or t
  misc_feature (117)..(117): n is a, c, g, or t
  misc_feature (231)..(231): n is a, c, g, or t
  misc_feature (247)..(247): n is a, c, g, or t
  misc_feature (252)..(252): n is a, c, g, or t
  misc_feature (261)..(261): n is a, c, g, or t
ttttaaatggttttnacaaganccacattttaatttgtatattccagaattgccacacagttagttgaacaattttatcagtcaaatttatcctcacgaaatctagcacttataggngaagatgcatcccaaatgaaatgctcttattttcagatttatcaagtttaaagatattctatcttgaacagacatgttactttcacctacatttgaaatgtcaaaatttctagntacacaaattgacagngatanccttaaatngttacaa

SEQ ID NO: 29 - DNA, 326 bp, Artificial Sequence
  Description of Artificial sequences:primer
  misc_feature (1)..(326): 5' terminal sequence from clone image:110486. hypothetical protein bc008217(LOC92906) gene.
  misc_feature (3)..(3): n is a, c, g, or t
  misc_feature (94)..(95): n is a, c, g, or t
ggnacgaggcactcaatggagctgatatatatgctggatgttgcacactaaaaattgaatatgcacgggtaaatatttttttcaacaccctaannaagaaatatttatgctttggatatgcagtttgaacttacattattttcaatcttaacagccaactcgtctaaatgttattaggaatgacaatgacagttgggactacactaaaccatatttgggaagacgaggtaggtattttatacattttaggaatgtacttgatctgctgacaaatttttatatgcagttaggttcttttttcctgaggtgaggctagttaattcaaa

SEQ ID NO: 30 - DNA, 2055 bp, Artificial Sequence
  Description of Artificial sequences:primer
  misc_feature (1)..(2055): hypothetical protein bc008217(LOC92906) gene.
ggagggagaggctgaatgttggctcggtaattgagaggagcggccgctccagagcttcctcccggggcgcccccctcagtccgtccgcgcttctcagccgccagtctcctggccgcgcagtccccgcggacggccgggccgcggagaccctcgcagaagaggcgctgccggcggcgaggactggccggcggcatccgaggcgcgcgccccaccgccacccccacccgcctgccagccggtccctccggccgccgccatgtcctcctcctcttcctcccccagggagacgtacgaggaggaccgggagtacgagagccaggccaagcgtctcaagaccgaggagggggagatcgactactcggccgaggaaggcgagaaccgccgggaagcgacgccccggggcgggggcgatggcggcggcggcggccggagcttctctcagccggaggcaggtggaagtcatcataaagtttctgtttcacccgtcgtccatgttcgaggactctgtgaatctgtggtggaagcagacctcgtggaagcgctggaaaaatttgggacaatatgctatgtgatgatgatgccatttaaacgacaggctctagtggaatttgaaaacatagatagtgccaaagaatgtgtgacatttgctgcagatgaacccgtgtacattgctggtcaacaggcttttttcaactattctacaagcaaaaggatcactcggccaggaaatactgatgatccatcaggaggcaacaaagttcttctgctctcaattcagaatccgctttatccaattacagtggatgttttatatactgtatgcaaccctgttggcaaagtgcaacgtattgttatattcaagagaaatgggatacaagcaatggttgagtttgaatcagtcctttgtgcccagaaagctaaagcagcactcaatggagctgatatatatgctggatgttgcacactaaaaattgaatatgcacggccaactcgtctaaatgttattaggaatgacaatgacagttgggactacactaaaccatatttgggaagacgagatagaggaaagggtcgccagagacaagccattttgggagaacacccttcttcgtttagacatgatggctatggatcccatggtccattattgcctttaccaagtcgttacagaatgggctctcgagatacacctgaacttgttgcttatccattaccacaggcttcttcctcttacatgcatggaggaaatccctctggttcagttgtaatggttagtggattacatcaactaaaaatgaattgttcaagagtcttcaacctgttctgcttatatggaaatattgagaaggtaaaatttatgaagaccattcctggtacagcactggtagaaatgggtgatgagtatgctgtagaaagagctgtcacacaccttaataatgtcaaattatttgggaaaagacttaatgtttgcgtgtctaaacaacattcagttgttccaagtcaaatatttgagctggaggatggtaccagcagctacaaagattttgcaatgagcaaaaataatcgctttacaagtgctggccaagcatctaagaatataatccagccaccctcctgtgttttgcattattataatgttccattgtgtgtcacagaagagaccttcacaaagttgtgtaatgaccatgaagttcttacattcatcaaatataaagtgtttgatgcaaaaccttcagccaaaacactttctgggctattagaatgggagtgcaaaactgatgcagtagaagcccttacggcactgaatcactatcagataagagtgccgaatggttccaatccctatacattgaagctttgcttttctacatcatcccatttataagaagagaagagcatgttagaatttatgttcacctttattacaatttcaaagctacacttcattaaaaaaaaatctaaaatggttgatctcatgttgccttgcttactttaagatcctgttctgtaataaacatattttgccttgagtaaaaaaaaaaaaaaaaaaaaaaa

SEQ ID NO: 31 - DNA, 294 bp, Artificial Sequence
  Description of Artificial sequences:primer
  misc_feature (1)..(294): 3' terminal sequence from clone image:111461. sry (sex determining region y)-box 4(SOX4) gene.
  misc_feature (161)..(161): n is a, c, g, or t
  misc_feature (257)..(257): n is a, c, g, or t
  misc_feature (271)..(271): n is a, c, g, or t
tttcttgtttttctttttttttttccgaaaccactcgccctccactgactgcccctgtaccacatcaaacagtctcctctcctccacgcctccggggtctgggaagtctcacctcactgatttcacgtagaaaagaaggcggaggccagcagccgcgcgcncaagctccccaacgtgcaaatccatttcagtttgaccgtgaacccccttccagttcgtgtcctcctccgcccccgcccctagctcccgctgctggnttccaacggggttntcgggtcatttcctagcgccggt

SEQ ID NO: 32 - DNA, 362 bp, Artificial Sequence
  Description of Artificial sequences:primer
  misc_feature (1)..(362): 5' terminal sequence from clone image:111461. sry (sex determining region y)-box 4(SOX4) gene.
  misc_feature (211)..(211): n is a, c, g, or t
  misc_feature (313)..(313): n is a, c, g, or t
  misc_feature (318)..(318): n is a, c, g, or t
  misc_feature (327)..(327): n is a, c, g, or t
  misc_feature (332)..(332): n is a, c, g, or t
ttccggacttgtctgcacccccagcaagaaggcgagttagttttctagagacttgaaggagtctcccccttcctgcatcaccaccttggttttgttttattttgcttcttggtcaagaaaggaggggagaacccagcgcacccctcccccctttttttaaacgcgtgatgaagacagaaggctccggggtgacgaatttggccgatggagnatgttttgggggaacgccgggactgagagactccacggcagggcgaattcccgtttggggctttttttttcctccctctttttccccttgccccttttgcanccggnggagggagntgttnaaggggagggagggccagccagtgttgacc

SEQ ID NO: 33 - DNA, 4912 bp, Artificial Sequence
  Description of Artificial sequences:primer
  misc_feature (1)..(4912): sry (sex determining region y)-box 4(SOX4) gene.
attggggtctgctctaagctgcagcaagagaaactgtgtgtgaggggaagaggcctgtttcgctgtcgggtctctagttcttgcacgctctttaagagtctgcactggaggaactcctgccattaccagctcccttcttgcagaagggagggggaaacatacatttattcatgccagtctgttgcatgcaggctttttggcttcctaccttgcaacaaaataattgcaccaactccttagtgccgattccgcccacagagagtcctggagccacagtcttttttgctttgcattgtaggagagggactaagtgctagagactatgtcgctttcctgagctaccgagagcgctcgtgaactggaatcaactgcttcagggaaaaagaaaaaaaaaaaaaaaagacttgcctgggaggccgcgagaaacttgcattggaagcttcagcaaccagcattcgagaaactcctctctactttagcacggtctccagactcagccgagagacagcaaactgcagcgcggtgagagagcgagagagagggagagagagactctccagcctgggaactataactcctctgcgagaggcggagaactccttccccaaatcttttggggacttttctctctttacccacctccgcccctgcgaggagttgaggggccagttcggccgccgcgcgcgtcttcccgttcggcgtgtgcttggcccggggaaccgggagggcccggcgatcgcgcggcggccgccgcgagggtgtgagcgcgcgtgggcgcccgccgagccgaggccatggtgcagcaaaccaacaatgccgagaacacggaagcgctgctggccggcgagagctcggactcgggcgccggcctcgagctgggaatcgcctcctcccccacgcccggctccaccgcctccacgggcggcaaggccgacgacccgagctggtgcaagaccccgagtgggcacatcaagcgacccatgaacgccttcatggtgtggtcgcagatcgagcggcgcaagatcatggagcagtcgcccgacatgcacaacgccgagatctccaagcggctgggcaaacgctggaagctgctcaaagacagcgacaagatccctttcattcgagaggcggagcggctgcgcctcaagcacatggctgactaccccgactacaagtaccggcccaggaagaaggtgaagtccggcaacgccaactccagctcctcggccgccgcctcctccaagccgggggagaagggagacaaggtcggtggcagtggcgggggcggccatgggggcggcggcggcggcgggagcagcaacgcggggggaggaggcggcggtgcgagtggcggcggcgccaactccaaaccggcgcagaaaaagagctgcggctccaaagtggcgggcggcgcgggcggtggggttagcaaaccgcacgccaagctcatcctggcaggcggcggcggcggcgggaaagcagcggctgccgccgccgcctccttcgccgccgaacaggcgggggccgccgccctgctgcccctgggcgccgccgccgaccaccactcgctgtacaaggcgcggactcccagcgcctcggcctccgcctcctcggcagcctcggcctccgcagcgctcgcggccccgggcaagcacctggcggagaagaaggtgaagcgcgtctacctgttcggcggcctgggcacgtcgtcgtcgcccgtgggcggcgtgggcgcgggagccgaccccagcgaccccctgggcctgtacgaggaggagggcgcgggctgctcgcccgacgcgcccagcctgagcggccgcagcagcgccgcctcgtcccccgccgccggccgctcgcccgccgaccaccgcggctacgccagcctgcgcgccgcctcgcccgccccgtccagcgcgccctcgcacgcgtcctcctcggcctcgtcccactcctcctcttcctcctcctcgggctcctcgtcctccgacgacgagttcgaagacgacctgctcgacctgaaccccagctcaaactttgagagcatgtccctgggcagcttcagttcgtcgtcggcgctcgaccgggacctggattttaacttcgagcccggctccggctcgcacttcgagttcccggactactgcacgcccgaggtgagcgagatgatctcgggagactggctcgagtccagcatctccaacctggttttcacctactgaagggcgcgcaggcagggagaagggccggggggggtaggagaggagaaaaaaaaagtgaaaaaaagaaacgaaaaggacagacgaagagtttaaagagaaaagggaaaaaagaaagaaaaagtaagcagggctggcttcgcccgcgttctcgtcgtcggatcaaggagcgcggcggcgttttggacccgcgctcccatcccccaccttcccgggccggggacccactctgcccagccggagggacgcggaggaggaagagggtagacaggggcgacctgtgattgttgttattgatgttgttgttgatggcaaaaaaaaaaaagcgacttcgagtttgctcccctttgcttgaagagaccccctcccccttccaacgagcttccggacttgtctgcacccccagcaagaaggcgagttagttttctagagacttgaaggagtctcccccttcctgcatcaccaccttggttttgttttattttgcttcttggtcaagaaaggaggggagaacccagcgcacccctccccccctttttttaaacgcgtgatgaagacagaaggctccggggtgacgaatttggccgatggcagatgttttgggggaacgccgggactgagagactccacgcaggcgaattcccgtttggggcttttttttcctccctcttttccccttgccccctctgcagccggaggaggagatgttgaggggaggaggccagccagtgtgaccggcgctaggaaatgacccgagaaccccgttggaagcgcagcagcgggagctaggggcgggggcggaggaggacacgaactggaagggggttcacggtcaaactgaaatggatttgcacgttggggagctggcggcggcggctgctgggcctccgccttcttttctacgtgaaatcagtgaggtgagacttcccagaccccggaggcgtggaggagaggagactgtttgatgtggtacaggggcagtcagtggagggcgagtggtttcggaaaaaaaaaaagaaaaaaagaaaaaaaaagaaaaaaaaaagatttttttcttctcttaatcggaatcgtgatggtgttggattatttcaatggtggggttaatatagcatgttatcctgtctatcttttaaagatttctgtataagactgttgagcagtttttaaaatagtgtaggataatataaaaagcagatagatggcgctatgtttgattcctacaacgaaattatcaccagctttttttcattcttaactctttaaaggattcaaacgcaactcaaatctgtgctggactttaaaaaaacaattcaggaccaaattttttctcagtgtgtgtgtttattccttataggtgtaaatgagaagacgtgtttttttccttcaccgatgctccatcctcgtatttctttttccttgtaaatgtaatcagatgccattttatatgtggacgtatttatactggccaaacatattttttcttttgtccctttttttctttcctttctttttacttcctttatttctttattccttccttttcctttttttcttttttttttctttttttttttttttttttggtagttgttgttacccacgccattttacgtctccttcactgaagggctagagttttaacttttaattttttatatttaaatgtagacttttgacacttttaaaaaacaaaaaaagacaagagagatgaaaacgtttgattattttctcagtgtatttttgtaaaaaatatataaagggggtgttaatcggtgtaaatcgctgtttggatttcctgattttataacagggcggctggttaatatctcacacagtttaaaaaatcagcccctaatttctccatgtttacacttcaatctgcaggcttcttaaagtgacagtatcccttaacctgccaccagtgtccaccctccggcccccgtcttgtaaaaaggggaggagaattagccaaacactgtaagcttttaagaaaaacaaagttttaaacgaaatactgctctgtccagaggctttaaaactggtgcaattacagcaaaaagggattctgtagctttaacttgtaaaccacatcttttttgcactttttttataagcaaaaacgtgccgtttaaaccactggatctatctaaatgccgatttgagttcgcgacactatgtactgcgtttttcattcttgtatttgactatttaatcctttctacttgtcgctaaatataattgttttagtcttatggcatgatgatagcatatgtgttcaggtttatagctgttgtgtttaaaaattgaaaaaagtggaaaacatctttgtacatttaagtctgtattataataagcaaaaagattgtgtgtatgtatgtttaatataacatgacaggcactaggacgtctgcctttttaaggcagttccgttaagggtttttgtttttaaacttttttttgccatccatcctgtgcaatatgccgtgtagaatatttgtcttaaaattcaaggccacaaaaacaatgtttgggggaaaaaaaagaaaaaatcatgccagctaatcatgtcaagttcactgcctgtcagattgttgatatataccttctgtaaataactttttttgagaaggaaataaaatcagctggaactgaaccctaaaaaaaaaaaaaaaaaaaaaaaaaaaaaaaaaaaa

SEQ ID NO: 34 - DNA, 361 bp, Artificial Sequence
  Description of Artificial sequences:primer
  misc_feature (1)..(361): 3' terminal sequence from clone image:113932. glutathione s-transferase a2(GSTA2) gene.
  misc_feature (204)..(204): n is a, c, g, or t
  misc_feature (243)..(243): n is a, c, g, or t
  misc_feature (261)..(261): n is a, c, g, or t
  misc_feature (302)..(302): n is a, c, g, or t
  misc_feature (332)..(332): n is a, c, g, or t
tttttatagtttccatttttactgaatttgtaattccaagaaaattgttggctaggaggagattggaaaactgaattcacatcagatcctaatgagaagaaatcaattttaactaagtgggtgaataggagttgtattatttaattagcatataatttgaaagagttcattagcttcacaacaggcacaatcagcacttagggnaaagcacttaattgttgcaaaactttaggaatactgggncttgcatgttcttgaccnctatgggctgggtttatttaaaaccctggaaaatcttcccntggattcttctaaaggatttcggcatccanggggagggcttccctgggggctgccaggg

SEQ ID NO: 35 - DNA, 358 bp, Artificial Sequence
  Description of Artificial sequences:primer
  misc_feature (1)..(358): 5' terminal sequence from clone image:113932. glutathione s-transferase a2(GSTA2) gene.
  misc_feature (179)..(179): n is a, c, g, or t
  misc_feature (316)..(316): n is a, c, g, or t
  misc_feature (338)..(338): n is a, c, g, or t
  misc_feature (345)..(345): n is a, c, g, or t
  misc_feature (350)..(350): n is a, c, g, or t
ggaattcggttgtccagccacaaaggtgacagcatttaacaaagcttagagaaacctccaggacactgctaccatggcagagaagcccaagctccactactccaatatacggggcagaatggagtccatccggtggctcctgggctgcagctggagtagagtttgaagagaaatttatnaaaatcttgcagaagatttgggacaagttaaggaaatgatgggatatttggatgttccaggcaagtgccaatggtttgaggatttgagggggatgaggctgggtgcagacccagagccatttttcaacttacatttncccagccaattacaacctcttntgggggnaaagnccttaagg

SEQ ID NO: 36 - DNA, 976 bp, Artificial Sequence
  Description of Artificial sequences:primer
  misc_feature (1)..(976): glutathione s-transferase a2(GSTA2) gene.
tattgagaggaacaaagagcttataaatacattaggacctggaattcggttgtccagccacaaaggtgacagcatttaacaaagcttagagaaacctccaggagactgctaccatggcagagaagcccaagctccactactccaatatacggggcagaatggagtccatccggtggctcctggctgcagctggagtagagtttgaagagaaatttataaaatctgcagaagatttggacaagttaagaaatgatggatatttgatgttccagcaagtgccaatggttgagattgatgggatgaagctggtgcagaccagagccattctcaactacattgccagcaaatacaacctctatgggaaagacataaaggagaaagccctgattgatatgtatatagaaggtatagcagatttgggtgaaatgatccttcttctgccctttactcaacctgaggaacaagatgccaagcttgccttgatccaagagaaaacaaaaaatcgctacttccctgcctttgaaaaagtcttaaagagccacggacaagactaccttgttggcaacaagctgagccgggctgacattcacctggtggaacttctctactacgtggaagagcttgactctagccttatttccagcttccctctgctgaaggccctgaaaaccagaatcagtaacctgcccacagtgaagaagtttctacagcctggcagcccaaggaagcctcccatggatgagaaatctttagaagaatcaaggaagattttcaggttttaataaaccagccatagaggtcaagaacatgcaagaccagtattctaaagttttgcaacaattaagtgctttacctaagtgttgattgtgcctgttgtgaagctaatgaactctttcaaattatatgctaattaaataatacaactcctattcacccacttagttaaaattgatttcttctcattaggatctgatgt

SEQ ID NO: 37 - DNA, 347 bp, Artificial Sequence
  Description of Artificial sequences:primer
  misc_feature (1)..(347): 3' terminal sequence from clone image:1144752. myeloid/lymphoid or mixed-lineage leukemia (trithorax homolog, drosophila), translocated to, 3(MLLT3) gene.
ttttttttttttttttttttttttttttttttttttttttgtttaaaagtcctacaagtttattgactaaggctagacagcaattcatatgatcctatttggtgcattttctaccatggtccaagatcattacatggatacagccaaggactgggccccaactttcaggaaaaagaccacaaagaagaaaatcaaggtggctatttggtccccccagttgataatctgtgtcctggaactggaaaaacaaaaggtggaaaatacagactgcaacgagttaaaggacttggaaaaagttggtggaaagtggcacggtatacgagtaaggtcactgggcttgggatggc

SEQ ID NO: 38 - DNA, 3376 bp, Artificial Sequence
  Description of Artificial sequences:primer
  misc_feature (1)..(3376): myeloid/lymphoid or mixed-lineage leukemia (trithorax homolog, drosophila) translocated to, 3(MLLT3) gene.
tttggggctgagtttaataagcgagcgagcgagcaagcgagcgcggggggaaaaaggcagagaatgtccgccatctaccctccgctcctgggcgcgctctcattcatagcagcctcttcatgaattacagctgagggggggcggaggaggggggggtaccacacaacaccccagcaaacctccgggcccccaggcatggctagctcgtgttccgtgcaggtgaagctggagctggggcaccgcgcccaggtgaggaaaaaacccaccgtggagggcttcacccacgactggatggtgttcgtacgcggtccggagcacagtaacatacagcactttgtggagaaagtcgtcttccacttgcacgaaagctttcctaggccaaaaagagtgtgcaaagatccaccttacaaagtagaagaatctgggtatgctggtttcattttgccaattgaagtttattttaaaaacaaggaagaacctaggaaagtccgctttgattatgacttattcctgcatcttgaaggccatccaccagtgaatcacctccgctgtgaaaagctaactttcaacaaccccacagaggactttaggagaaagttgctgaaggcaggaggggaccctaataggagtattcataccagcagcagcagcagcagcagcagtagcagcagcagcagcagcagcagcagcagcagtagcagcagcagcagcagcagcagcagcagcagtagcagcagcagtagcagcagcagcagcagcagtagtaccagtttttcaaagcctcacaaattaatgaaggagcacaaggaaaaaccttctaaagactccagagaacataaaagtgccttcaaagaaccttccagggatcacaacaaatcttccaaagaatcctctaagaaacccaaagaaaataaaccactgaaagaagagaaaatagttcctaagatggccttcaaggaacctaaacccatgtcaaaagagccaaaaccagatagtaacttactcaccatcaccagtggacaagataagaaggctcctagtaaaaggccgcccatttcagattctgaagaactctcagccaaaaaaaggaaaaagagtagctcagaggctttatttaaaagtttttctagcgcaccaccactgatactcacttgttctgctgacaaaaaacagataaaagataaatctcatgtcaagatgggaaaggtcaaaattgaaagtgagacatcagagaagaagaaatcaacgttaccgccatttgatgatattgtggatcccaatgattcagatgtggaggagaatatatcctctaaatctgattctgaacaacccagtcctgccagctccagctccagctccagctccagcttcacaccatcccagaccaggcaacaaggtcctttgaggtctataatgaaagatctgcattctgatgacaatgaggaggaatcagatgaagtggaggataacgacaatgactctgaaatggagaggcctgtaaatagaggaggcagccgaagtcgcagagttagcttaagtgatggcagcgatagtgaaagcagttctgcttcttcacccctacatcacgaacctccaccacccttactaaaaaccaacaacaaccagattcttgaagtgaaaagtccaataaagcaaagcaaatcagataagcaaataaagaatggtgaatgtgacaaggcatacctagatgaactggtagagcttcacagaaggttaatgacattgagagaaagacacattctgcagcagatcgtgaaccttatagaagaaactggacactttcatatcacaaacacaacatttgattttgatctttgctcgctggacaaaaccacagtccgtaaactacagagttacctggaaacatctggaacatcctgaggatataacaactggatgcatcaagaactattgtgttttttttttttggttttttttttttttggttgtgattttttgttcttgttgtttatatgaaaacactcaaaatgatgcaaccaaaagggaaaaaataaaaatcaaacaaccttcagctttatttttctttaaagccagtcatcatctcttgataaaggagaggttaaagcaaaccagcctcagcggaccactcttctctccaaggaaatccccgggaagagttagcctggatagccttgaaaacaaacaaatcaaacacaacacaagaaaactcaaagaatgtgtatggtatcatgtatctctctgtggtggttcattccacaggacgaatgcatattcaacacactgccttattacataactgatctatttattatcgcatacagatattctaagtcgttgagggaatgacaccatcagacattataagtacttggtcccgtggatgctctttcaatgcagcacccttgccatcccaagcccagtgaccttactcgtataccgtgccactttccaccaactttttccaagtcctttaactcgttgcagtctgtattttccaccttttgtttttccagttccaggacacagattatcaactggggggaccaaatagccaccttgattttcttctttgtggtctttttcctgaaagttggggcccagtccttggctgtatccatgtaatgatcttggaccatggtagaaaatgcaccaaataggatcatatgaattgctgtctagccttagtcaataaacttgtaggacttttaaacaaaagtgtacctgtaaatgtcctgaatccagcattgttgagctgtcatcaacattcttgtgtctgttttactgttacaatattaggtgaatatggaagtaaaggcattccacaggatcatcatttaaaaaaaaagaattctggtcctgttttctaaaaaaaaaaaactgttgtagaaattcttaatttggatctatttattagtcagagtttcagctttcttcagctgccagtgtgttactcatctttatcctaaaaatctggaatcagagatttttgtttgttcacatatgattctcttagacacttttatatttgaaaaaattaaaatctttctttggggaaaaattcttggttattctgccataacagattatgtattaacttgtagattcagtggttcaatacctgtttagttgcttgctaatatttccagaaggatttcttgtattggtgaaagacggttggggatggggggatttttttgttcttgttgtacccttgttttgaaactagaaatctgtcctgtggcatgcaaaagaaagcaaattatttttaaaagaaaaaaaccaaagtacttttggtgtcattattccatcttctccataagtggagaaatgaaaagtaagaacagctcatcttcaaagtttttactagaaattc

SEQ ID NO: 39 - DNA, 432 bp, Artificial Sequence
  Description of Artificial sequences:primer
  misc_feature (1)..(432): 3' terminal sequence from clone image:114639. transcription factor 3 (e2a immunoglobulin enhancer binding factors e12/e47)(TCF3) gene.
  misc_feature (16)..(16): n is a, c, g, or t
  misc_feature (21)..(21): n is a, c, g, or t
  misc_feature (354)..(354): n is a, c, g, or t
  misc_feature (410)..(410): n is a, c, g, or t
atgtcacgtttattgntacangtgctgttatatacaggacaggtctctgaatccacctgaaagagggtcgttttaaagtcccaatcatccagccagctgtgttgacacgtatacaattattttctttaaaaaaatttttttgaaaaccatcttgaggcactcagatcacaccccccaccccccataattgtggttcccaggaactgctgtttcttcctcctcgcgctgggtgaatctcgtttgaattctatgcagaacgcacagttccagaggctatgggggccactgccacccagacctaggggcagggcagggagcaaaacaagaggggagagggcaagttcccttaagagntcaaactcccggggcgtgggggaagccaccgagaagggagagggcagccggacagncccttcccttcgctgggctcgg

SEQ ID NO: 40 - DNA, 449 bp, Artificial Sequence
  Description of Artificial sequences:primer
  misc_feature (1)..(449): 5' terminal sequence from clone image:114639. transcription factor 3 (e2a immunoglobulin enhancer binding factors e12/e47)(TCF3) gene.
  misc_feature (67)..(67): n is a, c, g, or t
  misc_feature (222)..(222): n is a, c, g, or t
  misc_feature (334)..(334): n is a, c, g, or t
  misc_feature (368)..(368): n is a, c, g, or t
  misc_feature (375)..(375): n is a, c, g, or t
  misc_feature (416)..(416): n is a, c, g, or t
  misc_feature (440)..(440): n is a, c, g, or t
ctctctccaggtctccttttctggtcttttgccatgagggtaaccagctcttcccagctggctgggnactgtcttgggtttaaaactgcaagtctcctaccctgggatcccatccagttccacacgaactagggcagtggtcactgtggcacccaggtgtgggcctgggctagctgggggccttcatgtgcccttcatgcccctccctgcattgaggccttntgggacccctgggctggctgtgttcatccccgctgcaggtcggggcgtctccccccgtgccactcctggaggattcccaccgttaacccccagggagattcctggggacttncctggacttcccccttccccagaattgggctttnggggagnctggggggcccccatgggttaggatggcaaaggggaaaacntcaaagggccaagttcaaatggcnggggtaatt

SEQ ID NO: 41 - DNA, 4396 bp, Artificial Sequence
  Description of Artificial sequences:primer
  misc_feature (1)..(4396): transcription factor 3 (e2a immunoglobulin enhancer binding factors e12/e47)(TCF3) gene.
gcctgaggtgcccgccctggccccaggagaatgaaccagccgcagaggatggcgcctgtgggcacagacaaggagctcagtgacctcctggacttcagcatgatgttcccgctgcctgtcaccaacgggaagggccggcccgcctccctggccggggcgcagttcggaggttcaggtcttgaggaccggcccagctcaggctcctggggcagcggcgaccagagcagctcctcctttgaccccagccggaccttcagcgagggcacccacttcactgagtcgcacagcagcctctcttcatccacattcctgggaccgggactcggaggcaagagcggtgagcggggcgcctatgcctccttcgggagagacgcaggcgtgggcggcctgactcaggctggcttcctgtcaggcgagctggccctcaacagccccgggcccctgtccccttcgggcatgaaggggacctcccagtactacccctcctactccggcagctcccggcggagagcggcagacggcagcctagacacgcagcccaagaaggtccggaaggtcccgccgggtcttccatcctcggtgtacccacccagctcaggtgaggactacggcagggatgccaccgcctacccgtccgccaagacccccagcagcacctatcccgcccccttctacgtggcagatggcagcctgcacccctcagccgagctctggagtcccccgggccaggcgggcttcgggcccatgctgggtgggggctcatccccgctgcccctcccgcccggtagcggcccggtgggcagcagtggaagcagcagcacgtttggtggcctgcaccagcacgagcgtatgggctaccagctgcatggagcagaggtgaacggtgggctcccatctgcatcctccttctcctcagcccccggagccacgtacggcggcgtctccagccacacgccgcctgtcagcggggccgacagcctcctgggctcccgagggaccacagctggcagctccggggatgccctcggcaaagcactggcctcgatctactccccggatcactcaagcaataacttctcgtccagcccttctacccccgtgggctccccccagggcctggcaggaacgtcacagtggcctcgagcaggagcccccggtgccttatcgcccagctacgacgggggtctccacggcctgcagagtaagatagaagaccacctggacgaggccatccacgtgctccgcagccacgccgtgggcacagccggcgacatgcacacgctgctgcctggccacggggcgctggcctcaggtttcaccggccccatgtcgctgggtgggcggcacgcaggcctggttggaggcagccaccccgaggacggcctcgcaggcagcaccagcctcatgcacaaccacgcggccctccccagccagccaggcaccctccctgacctgtctcggcctcccgactcctacagtgggctagggcgagcaggtgccacggcggccgccagcgagatcaagcgggaggagaaggaggacgaggagaacacgtcagcggctgaccactcggaggaggagaagaaggagctgaaggccccccgggcccggaccagcccagacgaggacgaggacgaccttctccccccagagcagaaggccgagcgggagaaggagcgccgggtggccaataacgcccgggagcggctgcgggtccgtgacatcaacgaggcctttaaggagctggggcgcatgtgccaactgcacctcaacagcgagaagccccagaccaaactgctcatcctgcaccaggctgtctcggtcatcctgaacttggagcagcaagtgcgagagcggaacctgaatcccaaagcagcctgtttgaaacggcgagaagaggaaaaggtgtcaggtgtggttggagacccccagatggtgctttcagctccccacccaggcctgagcgaagcccacaaccccgccgggcacatgtgaaaggtatgcctccgtgggacgagccacccgctttcagccctgtgctctggccccagaagccggactcgagaccccgggcttcatccacatccacacctcacacacctgttgtcagcatcgagccaacaccaacctgacaaggttcggagtgatgggggcggccaaggtgacactgggtccaggagctccctggggccctggcctaccactcactggcctcgctccccctgtccccgaatctcagccaccgtgtcactctgtgacctgtcccatggatcctgaaactgcatcttggccctgttgcctgggctgacaggagcattttttttttttccagtaaacaaaacctgaaagcaagcaacaaaacatacactttgtcagagaagaaaaaaatgccttaactataaaaagcggagaaatggaaacatatcactcaagggggatgctgtggaaacctggcttattcttctaaagccaccagcaaattgtgcctaagcgaaatattttttttaaggaaaataaaaacattagttacaagattttttttttcttaaggtagatgaaaattagcaaggatgctgcctttggtctctggtttttttaagctttttttgcatatgttttgtaagcaacaaatttttttgtataaaagtcccgtgtctctcgctatttctgctgctgttcctagactgagcattgcatttcttgatcaaccagatgattaaacgttgtattaaaaagaccccgtgtaaacctgagccccccccgtccccccccccggaagccactgcacacagacagacggggacaggcggcgggtcttttgtttttttgatgttgggggttctcttggttttgtcatgtggaaagtgatgcgtgggcgttccctgatgaaggcaccttggggcttccctgccgcatcctctcccctcaggaaggggactgacctgggcttgggggaagggacgtcagcaaggtggctctgaccctcccaggtgactctgccaagcagctgtggccccagcggtaccctacacaacgccctccccaggcccccctaagctgctctcccttggaacctgcacagctctctgaaatggggcattttgttgggaccagtgacccctggcatggggaccacaccctggagcccggtgctggggacctcctggacaccctgtccttcactccttgccccagggacccaggctcatgctctgaactctggctgagaggagtctgctcaggagccagcacaggacaccccccaccccaccccaccatgtccccattacaccagagggccatcgtgacgtagacaggatgccaggggcctgaccagcctccccaatgctggggagcatccctggcctggggccacacctgctgccctccctctgtgtggtccaagggcaagagtggctggagccgggggactgtgctggtctgagccccacgaaggccttgggctgtggctccgaccctgctgcagaaccagcagggtgtcccctcgggcccatctgtgtcccatgtcccagcacccaggcctctctccaggtctccttttctggtcttttgccatgagggtaaccagctcttcccagctggctgggactgtcttgggtttaaaactgcaagtctcctaccctgggatcccatccagttccacacgaactagggcagtggtcactgtggcacccaggtgtgggcctggctagctgggggccttcatgtgcccttcatgcccctccctgcattgaggccttgtggacccctgggctggctgtgttcatccccgctgcaggtcgggcgtctccccccgtgccactcctgagactccaccgttacccccaggagatcctggactgcctgactcccctccccagactggcttgggagcctgggccccatggtagatgcaagggaaacctcaaggccagctcaatgcctggtatctgcccccagtccaggccaggcggaggggaggggctgtccggctgcctctcccttctcggtggcttcccctgcgccctgggagtttgatctcttaagggaacttgcctctccctcttgttttgctcctgccctgcccctaggtctgggtggcagtggccccatagcctctggaactgtgcgttctgcatagaattcaaacgagattcacccagcgcgaggaggaagaaacagcagttcctgggaaccacaattatggggggtggggggtgtgatctgagtgcctcaagatggttttcaaaaaattttttttaaagaaaataattgtatacgtgtcaacacagctggctggatgattgggactttaaaacgaccctctttcaggtggattcagagacctgtcctgtatataacagcactgtagcaataaacgtgacattttataaag

SEQ ID NO: 42 - DNA, 257 bp, Artificial Sequence
  Description of Artificial sequences:primer
  misc_feature (1)..(257): 3' terminal sequence from clone image:116906. pms2 postmeiotic segregation increased 2 (s. cerevisiae)(PMS2) gene.
  misc_feature (82)..(82): n is a, c, g, or t
  misc_feature (182)..(182): n is a, c, g, or t
  misc_feature (251)..(251): n is a, c, g, or t
  misc_feature (255)..(255): n is a, c, g, or t
taagtagcaggtttcattttaaaacaaaaaaggttagtgaagactctgtctttcaaaacataaaaatctgcgataaaaccanttattccatacagtgactacggtcagttctgagaaatgacacccaggttggcgatgtgtctcatggttggccttccatggggacagttccaggggtggtncatctcccccatgtgggtgatcagtttcttcatctcgcttgtgttgagagcagtcccaatcatcaccgncttncg

SEQ ID NO: 43 - DNA, 344 bp, Artificial Sequence
  Description of Artificial sequences:primer
  misc_feature (1)..(344): 5' terminal sequence from clone image:116906. pms2 postmeiotic segregation increased 2 (s. cerevisiae)(PMS2) gene.
  misc_feature (336)..(336): n is a, c, g, or t
  misc_feature (343)..(343): n is a, c, g, or t
gaaatggaaatcattggtcagtttaacctggggatttataataaccaaactgaatgaggatatcttcatagtggaccagcatgccacggacgagaagtataacttcgagatgctgcagcagcacaccgtcttccaggggcagaggctcatagcacctcagactctcaacttaactgctgttaatgaagctgttctgatagaaaatctggaaatatttagaaagaatggctttgattttgttatcgatgaaaatgtcatggatttttctcaaaattgtattcttttagctccagtcactgaaagggctaaactgatttcccttgccaactggtaaancctgggnc

SEQ ID NO: 44 - DNA, 2771 bp, Artificial Sequence
  Description of Artificial sequences:primer
  misc_feature (1)..(2771): pms2 postmeiotic segregation increased 2 (s. cerevisiae)(PMS2) gene.
cgaggcggatcgggtgttgcatccatggagcgagctgagagctcgagtacagaacctgctaaggccatcaaacctattgatcggaagtcagtccatcagatttgctctgggcaggtggtactgagtctaagcactgcggtaaaggagttagtagaaaacagtctggatgctggtgccactaatattgatctaaagcttaaggactatggagtggatcttattgaagtttcagacaatggatgtggggtagaagaagaaaacttcgaaggcttaactctgaaacatcacacatctaagattcaagagtttgccgacctaactcaggttgaaacttttggctttcggggggaagctctgagctcactttgtgcactgagcgatgtcaccatttctacctgccacgcatcggcgaaggttggaactcgactgatgtttgatcacaatgggaaaattatccagaaaaccccctacccccgccccagagggaccacagtcagcgtgcagcagttattttccacactacctgtgcgccataaggaatttcaaaggaatattaagaaggagtatgccaaaatggtccaggtcttacatgcatactgtatcatttcagcaggcatccgtgtaagttgcaccaatcagcttggacaaggaaaacgacagcctgtggtatgcacaggtggaagccccagcataaaggaaaatatcggctctgtgtttgggcagaagcagttgcaaagcctcattccttttgttcagctgccccctagtgactccgtgtgtgaagagtacggtttgagctgttcggatgctctgcataatcttttttacatctcaggtttcatttcacaatgcacgcatggagttggaaggagttcaacagacagacagtttttctttatcaaccggcggccttgtgacccagcaaaggtctgcagactcgtgaatgaggtctaccacatgtataatcgacaccagtatccatttgttgttcttaacatttctgttgattcagaatgcgttgatatcaatgttactccagataaaaggcaaattttgctacaagaggaaaagcttttgttggcagttttaaagacctctttgataggaatgtttgatagtgatgtcaacaagctaaatgtcagtcagcagccactgctggatgttgaaggtaacttaataaaaatgcatgcagcggatttggaaaagcccatggtagaaaagcaggatcaatccccttcattaaggactggagaagaaaaaaaagacgtgtccatttccagactgcgagaggccttttctcttcgtcacacaacagagaacaagcctcacagcccaaagactccagaaccaagaaggagccctctaggacagaaaaggggtatgctgtcttctagcacttcaggtgccatctctgacaaaggcgtcctgagacctcagaaagaggcagtgagttccagtcacggacccagtgaccctacggacagagcggaggtggagaaggactcggggcacggcagcacttccgtggattctgaggggttcagcatcccagacacgggcagtcactgcagcagcgagtatgcggccagctccccaggggacaggggctcgcaggaacatgtggactctcaggagaaagcgcctgaaactgacgactctttttcagatgtggactgccattcaaaccaggaagataccggatgtaaatttcgagttttgcctcagccaactaatctcgcaaccccaaacacaaagcgttttaaaaaagaagaaattctttccagttctgacatttgtcaaaagttagtaaatactcaggacatgtcagcctctcaggttgatgtagctgtgaaaattaataagaaagttgtgcccctggacttttctatgagttctttagctaaacgaataaagcagttacatcatgaagcacagcaaagtgaaggggaacagaattacaggaagtttagggcaaagatttgtcctggagaaaatcaagcagccgaagatgaactaagaaaagagataagtaaaacgatgtttgcagaaatggaaatcattggtcagtttaacctgggatttataataaccaaactgaatgaggatatcttcatagtggaccagcatgccacggacgagaagtataacttcgagatgctgcagcagcacaccgtgctccaggggcagaggctcatagcacctcagactctcaacttaactgctgttaatgaagctgttctgatagaaaatctggaaatatttagaaagaatggctttgattttgttatcgatgaaaatgctccagtcactgaaagggctaaactgatttccttgccaactagtaaaaactggaccttcggaccccaggacgtcgatgaactgatcttcatgctgagcgacagccctggggtcatgtgccggccttcccgagtcaagcagatgtttgcctccagagcctgccggaagtcggtgatgattgggactgctcttaacacaagcgagatgaagaaactgatcacccacatgggggagatggaccacccctggaactgtccccatggaaggccaaccatgagacacatcgccaacctgggtgtcatttctcagaactgaccgtagtcactgtatggaataattggttttatcgcagatttttatgttttgaaagacagagtcttcactaaccttttttgttttaaaatgaaacctgctacttaaaaaaaatacacatcacacccatttaaaagtgatcttgagaaccttttcaaacc

SEQ ID NO: 45 - DNA, 338 bp, Artificial Sequence
  Description of Artificial sequences:primer
  misc_feature (1)..(338): 3' terminal sequence from clone image:117240. lim domain containing preferred translocation partner in lipoma(LPP) gene.
  misc_feature (279)..(279): n is a, c, g, or t
  misc_feature (308)..(308): n is a, c, g, or t
  misc_feature (313)..(313): n is a, c, g, or t
gagatttggtggttatcatttacatcattgactcttcagtggaatattcatagtagtgtaaatagattctttgaaaataaggcacaagtatatgttgttctctgattgtctcccacgagagtgcaccaaacgagcgatcccaagaaatggacttgaggcacattttgcagaggtgtctttttcagtttgctggtttcccacagatgggctaaagcaggggtatgggaacatgctgtcatatttcattcataacacacatgtactttaggctctaggggnaacagatgggggcaatcgctttgttttgnacctnccaaatgtggaaatacttaggggtg

SEQ ID NO: 46 - DNA, 174 bp, Artificial Sequence
  Description of Artificial sequences:primer
  misc_feature (1)..(174): 5' terminal sequence from clone image:117240. lim domain containing preferred translocation partner in lipoma(LPP) gene.
  misc_feature (92)..(92): n is a, c, g, or t
  misc_feature (95)..(95): n is a, c, g, or t
  misc_feature (100)..(100): n is a, c, g, or t
  misc_feature (107)..(107): n is a, c, g, or t
  misc_feature (128)..(128): n is a, c, g, or t
  misc_feature (167)..(167): n is a, c, g, or t
aaggcatcaggttgttagatgctggcatctctgcagctcaaaggtgtgggttctttttcttgtcattaacacattgttatttctgtaggagnaanttctntgatcanaattacttttctgggtatgtnctgattaagggggtggacttatcaacactataattgttncctatgg

SEQ ID NO: 47 - DNA, 5656 bp, Artificial Sequence
  Description of Artificial sequences:primer
  misc_feature (1)..(5656): lim domain containing preferred translocation partner in lipoma(LPP) gene.
  misc_feature (4528)..(4528): n is a, c, g, t or u
gtcacttttatttgggggtgtggacagctgctttcccaggggagtacttcttacagtgggatttcaagacaagatcggcctgaagaaaaattatatttgtatattttttaaaaagtgggaactttgaggctcagagacagagcagaagacagaacctggtcttctgattccctgtgttctgcttttttcattgttccactggacgctcatcagagggaagatctttttcctcaattgattccaacaatgtctcacccatcttggctgccacccaaaagcactggtgagcccctcggccatgtgcctgcacggatggagaccacccattcctttgggaaccccagcatttcagtgtctacacaacagccacccaaaaagtttgccccggtagttgctccaaaacctaagtacaacccatacaaacaacctggaggtgagggtgattttcttccacccccacctccacctctagatgattccagtgcccttccatctatctctggaaactttcctcctccaccacctcttgatgaagaggctttcaaagtacaggggaatcccggaggcaagacacttgaggagaggcgctccagcctggacgctgagattgactccttgaccagcatcttggctgaccttgagtgcagctccccctataagcctcggcctccacagagctccactggttcaacagcctctcctccagtttcgaccccagtcacaggacacaagagaatggtcatcccgaaccaaccccctctaacagcaaccaagaagtctacattgaaaccacagcctgcaccccaggctggacccatccctgtggctccaatcggaacactcaaaccccagcctcagccagtcccagcctcctacaccacggcctccacttcttcaaggcctacctttaatgtgcaggtgaagtcagcccagcccagccctcattatatggctgccccttcatcaggacaaatttatggctcagggccccagggctataacactcagccagttcctgtctctgggcagtgtccacctccttcaacacggggaggcatggattatgcctacattccaccaccaggacttcagccggagcctgggtatgggtatgcccccaaccagggacgctattatgaaggctactatgcagcagggccaggctatgggggcagaaatgactctgaccctacctatggtcaacaaggtcacccaaatacctggaaacgggaaccagggtacactcctcctggagcagggaaccagaaccctcctgggatgtatccagtcactggtcccaagaagacctatatcacagatcctgtttcagccccctgtgcgccaccattgcagccaaagggtggccattcagggcaactggggccttcgtcagttgccccttcattccgcccagaggatgagcttgagcacctgaccaaaaagatgctgtatgacatggaaaatccacctgctgacgaatactttggccgctgtgctcgctgtggagaaaacgtagttggggaaggtacaggatgcactgccatggatcaggtcttccacgtggattgttttacctgcatcatctgcaacaacaagctccgagggcagccattctatgctgtggaaaagaaagcatactgcgagccctgctacattaatactctggagcagtgcaatgtgtgttccaagcccatcatggagcggattctccgagccaccgggaaggcctatcatcctcactgtttcacctgcgtgatgtgccaccgcagcctggatgggatcccattcactgtggatgctggcgggctcattcactgcattgaggacttccacaagaaatttgccccgcggtgttctgtgtgcaaggagcctattatgccagccccgggccaggaggagactgtccgtattgtggctttggatcgagatttccatgttcactgctaccgatgcgaggattgcggtggtctcctgtctgaaggagataaccaaggctgctaccccttggatgggcacatcctctgcaagacctgcaactctgcccgcatcagggtgttgaccgccaaggcgagcactgacctttagattcagtcacctgttcagccggcactgagaagaacgaacacaagaaaaagataagaaatactagagtaaaggccatcaaactacgcgatagtctctgttcttcatctgctattaaccttgccttagaaacacataaattatgagatttttttttaaaagttgttaccaaatacacatttcacattgaatcatgtaggatcttgatgggcctttgttcccaaggacttccacatttttgcacagattatgctccatcccttcacttctgcattcctgtaacttttaatccctatgtttgtctcacttttcatctggttgaatggcttttcttagtgtggtatttgctgtcacatagttttttcctgggtgagtctgccaactcacaggtgcttttaggcttgaaatctccatcctatcatttccgttttgcctgtgactgtaaagagtagccattcttttcccatgtattgaagaggatattcttctcttgctttatactactcacgtccttggggagggaaatgcacaatttttttttgttaggctgtaaagaatttaagctgtaaattacataagttagaacaagcccaaatttaatttgcaaccatcagaattcagaatctatagtgaccagtgatcaaggctaattggaaaagagttatcggcccatagctaataagtagtgacagacaaccaagcttcaatatttttctaaagaaattacaggtgggatatgctagaaaaggcattttggggttatgtttaaaaaaacattattgtcccacaatattaccttaagatttttcttttccgcactacctgaacattgtaatacagacaaacttgatttcttctagaagataacattttcaatactgtcccacttctcatcttaaaaatattgtcatgtttattctaatatccaacgcaactatcaaaattgcctttttctctagaggatgaaggctgtgaaaaaaccgttcaaattctcttctttttcttttttattaccaggtccattttgcctgacaattgcaaatcagagcatacaaaataaaactgtgcagttttgtttggtttactttcaaaagagtagaaagcttgaaaagattctgaaaccacagtttcattattctcataatccttctgcaactgaaattacatattgcaggagacattttcatatcatcaatgtgacatttacaccacactttcaaagacaatcactgaaacaaaaattgtctttatgagctaaaaatatgcagaatctctgcctagaatctttattcaaacttttattagccagtgaaacacttgcttgccaactgccaagccatacttattaagttcgaacatgtttcacttaaggagagacacctagcttagtcatggcaagttgccattttgtaaactaaggattttggactgagatttcttaaatctttcttcaaatctcccacaagtatatacttttaaattatggagtattttaagtctacaaaaaggtataaataataatataatgaattcctatatacctaatacccagtttaagacaccaaatataacaagtataattacatcctccaatgtaccgtttccttattccacagatatctttttcattattgtgaagtgatgttcagatttctagtttttttttctagtttttaattttaacatcagaactgaaataaaaaattatggatacgtgttttgaattgcaaactattcctcaggaattccaattaaatttattttacttgaataggaatgatcataaaagtgattctttttttgtgactagaaattcttaagccgatggtcactatagctcatccttaatgtatggctcatttgcttttgtcactaaacggttttgtgttagaaccaccaaaattatagcttttaagagcttcctttgaccactgtctttttcttaccctacttctcttatctttgatcgtatatttctcataatgtgaaatatgatgagattcacttaggggcagcatgttagttttgggaggcaatgtcaactgtgtctctgaattcctgtcttccaaattgaagccagaccatgctgatgacctcaagtagcactgactatttgacaatagggctgataatgtaatcggcttgaattttgacttagtaactttttatgtaatactttcggagaaattctctttaggacaaagcagagagtccaatttattgagggatagattgtatctcttaaagtggtcatattattattaattttgcaaaaagaagaagaatttattgaatatttatactataaaatgcagtaacattctacttgcttattacatttaaacccttgtgtaaccgaatgtttacatgtcaagaggaaaagctgtaagaaaatgctgtcacagacccatccctgtggcatcgtcagcaggatactgcttgcttncccctttattatgcattcttataacataacctcagagtatctttaccaaaggtttttaaagtaaatctctttttaagatagacttattcttttataataatgaatgtgcactcatacatatgtagaaacatttagatttagagttttttttttctttcacaaggtataataaggaaaggatcctacaatattttattctagggtttcttaaatatatgatttatattactgtcttttctattaatcatttgatttaaacaatgccaagtcactcttttttagttgcatgaaattttgcctgcaacagagagaaaaagattgtattactttaatgattataatcatactgtctgctgatataatatcataattgttgtggtttaaatacataaatagtagaaaaatcagagtctataacagaaagtttgtaaaaatatactgattttgaaaagtatcaggaatataaatatttggtaattctgtgtaacaagagagacatggaaaaggaaaaaaatccactatatcatgggctctgcagaacatatcaaaataggatttcttaaatttttcaacccccagaccatactgactcaacatggagtctcactggccaagaaaattgcctttaaaactcgaaaataaggccaggtgtggtgactcacacttgtaatcccagcaatttgggaggctgagacaggaggattgcctgaggccaggagtttgacaccagcctgggcaacatagtgagaccttgtctctacaaaaaataaaataaaataaaaaaccaaattagccagacatggtggcatgcgcttgtttaaaaaaacaaataaataaataatcgactcaaaaataagtcatgtgtcccagcataaggcatcaggttgttagatgctggcatctctgcagctcaaagatgtgggttctttttcttgtcattaacacattgttatttctgtaggaccaacttctctgatcaaaattacttttctgggtatgtgctgattaagggggtggacttatcaacactataattgttccctatgaaagattccacagagatgtttatggtgaggtttaaaggatatgaaactctacatttaaaacaagtattttatatttgggcac

SEQ ID NO: 48 - DNA, 407 bp, Artificial Sequence
  Description of Artificial sequences:primer
  misc_feature (1)..(407): 3' terminal sequence from clone image:117755. protein tyrosine phosphatase, receptor type, c(PTPRC) gene.
  misc_feature (33)..(33): n is a, c, g, or t
  misc_feature (296)..(296): n is a, c, g, or t
  misc_feature (335)..(335): n is a, c, g, or t
  misc_feature (355)..(355): n is a, c, g, or t
  misc_feature (376)..(376): n is a, c, g, or t
  misc_feature (389)..(389): n is a, c, g, or t
  misc_feature (403)..(403): n is a, c, g, or t
caatgggaccactgaagaaattgctgaaggatntcactctccttctcagtttgaggagcaagtgaggatcctcaggcaccccgtggtctggccagctggtgaactgaatgtgagtcacctctcttccagttgctttttcttttttctagtcaagagataatattttctttgagatgatttttttaaagcaaactatgaaacataaataagtggaagggagtaccagtacaaagtctcctcgtgtaaacataaactactcaaaagagttcatagtttcctcaggtgtcttatatatnttctcaaccctggttgtgttttcctttcctaatcaatanctagtagttaaggatattgntgcaggacttgcctgtactancccgttaagccanttaacttaaccggnaggg

SEQ ID NO: 49 - DNA, 5026 bp, Artificial Sequence
  Description of Artificial sequences:primer
  misc_feature (1)..(5026): protein tyrosine phosphatase, receptor type, c(PTPRC) gene.
agaggaggaaattgttcctcgtctgataagacaacagtggagaaaggacgcatgctgtttcttagggacacggctgacttccagatatgaccatgtatttgtggcttaaactcttggcatttggctttgcctttctggacacagaagtatttgtgacagggcaaagcccaacaccttcccccactggattgactacagcaaagatgcccagtgttccactttcaagtgaccccttacctactcacaccactgcattctcacccgcaagcacctttgaaagagaaaatgacttctcagagaccacaacttctcttagtccagacaatacttccacccaagtatccccggactctttggataatgctagtgcttttaataccacaggtgtttcatcagtacagacgcctcaccttcccacgcacgcagactcgcagacgccctctgctggaactgacacgcagacattcagcggctccgccgccaatgcaaaactcaaccctaccccaggcagcaatgctatctcagatgtcccaggagagaggagtacagccagcacctttcctacagacccagtttccccattgacaaccaccctcagccttgcacaccacagctctgctgccttacctgcacgcacctccaacaccaccatcacagcgaacacctcagatgcctaccttaatgcctctgaaacaaccactctgagcccttctggaagcgctgtcatttcaaccacaacaatagctactactccatctaagccaacatgtgatgaaaaatatgcaaacatcactgtggattacttatataacaaggaaactaaattatttacagcaaagctaaatgttaatgagaatgtggaatgtggaaacaatacttgcacaaacaatgaggtgcataaccttacagaatgtaaaaatgcgtctgtttccatatctcataattcatgtactgctcctgataagacattaatattagatgtgccaccaggggttgaaaagtttcagttacatgattgtacacaagttgaaaaagcagatactactatttgtttaaaatggaaaaatattgaaacctttacttgtgatacacagaatattacctacagatttcagtgtggtaatatgatatttgataataaagaaattaaattagaaaaccttgaacccgaacatgagtataagtgtgactcagaaatactctataataaccacaagtttactaacgcaagtaaaattattaaaacagattttgggagtccaggagagcctcagattattttttgtagaagtgaagctgcacatcaaggagtaattacctggaatccccctcaaagatcatttcataattttaccctctgttatataaaagagacagaaaaagattgcctcaatctggataaaaacctgatcaaatatgatttgcaaaatttaaaaccttatacgaaatatgttttatcattacatgcctacatcattgcaaaagtgcaacgtaatggaagtgctgcaatgtgtcatttcacaactaaaagtgctcctccaagccaggtctggaacatgactgtctccatgacatcagataatagtatgcatgtcaagtgtaggcctcccagggaccgtaatggcccccatgaacgttaccatttggaagttgaagctggaaatactctggttagaaatgagtcgcataagaattgcgatttccgtgtaaaagatcttcaatattcaacagactacacttttaaggcctattttcacaatggagactatcctggagaaccctttattttacatcattcaacatcttataattctaaggcactgatagcatttctggcatttctgattattgtgacatcaatagccctgcttgttgttctctacaaaatctatgatctacataagaaaagatcctgcaatttagatgaacagcaggagcttgttgaaagggatgatgaaaaacaactgatgaatgtggagccaatccatgcagatattttgttggaaacttataagaggaagattgctgatgaaggaagactttttctggctgaatttcagagcatcccgcgggtgttcagcaagtttcctataaaggaagctcgaaagccctttaaccagaataaaaaccgttatgttgacattcttccttatgattataaccgtgttgaactctctgagataaacggagatgcagggtcaaactacataaatgccagctatattgatggtttcaaagaacccaggaaatacattgctgcacaaggtcccagggatgaaactgttgatgatttctggaggatgatttgggaacagaaagccacagttattgtcatggtcactcgatgtgaagaaggaaacaggaacaagtgtgcagaatactggccgtcaatggaagagggcactcgggcttttggagatgttgttgtaaagatcaaccagcacaaaagatgtccagattacatcattcagaaattgaacattgtaaataaaaaagaaaaagcaactggaagagaggtgactcacattcagttcaccagctggccagaccacggggtgcctgaggatcctcacttgctcctcaaactgagaaggagagtgaatgccttcagcaatttcttcagtggtcccattgtggtgcactgcagtgctggtgttgggcgcacaggaacctatatcggaattgatgccatgctagaaggcctggaagccgagaacaaagtggatgtttatggttatgttgtcaagctaaggcgacagagatgcctgatggttcaagtagaggcccagtacatcttgatccatcaggctttggtggaatacaatcagtttggagaaacagaagtgaatttgtctgaattacatccatatctacataacatgaagaaaagggatccacccagtgagccgtctccactagaggctgaattccagagacttccttcatataggagctggaggacacagcacattggaaatcaagaagaaaataaaagtaaaaacaggaattctaatgtcatcccatatgactataacagagtgccacttaaacatgagctggaaatgagtaaagagagtgagcatgattcagatgaatcctctgatgatgacagtgattcagaggaaccaagcaaatacatcaatgcatcttttataatgagctactggaaacctgaagtgatgattgctgctcagggaccactgaaggagaccattggtgacttttggcagatgatcttccaaagaaaagtcaaagttattgttatgctgacagaactgaaacatggagaccaggaaatctgtgctcagtactggggagaaggaaagcaaacatatggagatattgaagttgacctgaaagacacagacaaatcttcaacttatacccttcgtgtctttgaactgagacattccaagaggaaagactctcgaactgtgtaccagtaccaatatacaaactggagtgtggagcagcttcctgcagaacccaaggaattaatctctatgattcaggtcgtcaaacaaaaacttccccagaagaattcctctgaagggaacaagcatcacaagagtacacctctactcattcactgcagggatggatctcagcaaacgggaatattttgtgctttgttaaatctcttagaaagtgcggaaacagaagaggtagtggatatttttcaagtggtaaaagctctacgcaaagctaggccaggcatggtttccacattcgagcaatatcaattcctatatgacgtcattgccagcacctaccctgctcagaatggacaagtaaagaaaaacaaccatcaagaagataaaattgaatttgataatgaagtggacaaagtaaagcaggatgctaattgtgttaatccacttggtgccccagaaaagctccctgaagcaaaggaacaggctgaaggttctgaacccacgagtggcactgaggggccagaacattctgtcaatggtcctgcaagtccagctttaaatcaaggttcataggaaaagacataaatgaggaaactccaaacctcctgttagctgttatttctatttttgtagaagtaggaagtgaaaataggtatacagtggattaattaaatgcagcgaaccaatatttgtagaagggttatattttactactgtggaaaaatatttaagatagttttgccagaacagtttgtacagacgtatgcttattttaaaattttatctcttattcagtaaaaaacaacttctttgtaatcgttatgtgtgtatatgtatgtgtgtatgggtgtgtgtttgtgtgagagacagagaaagagagagaattctttcaagtgaatctaaaagcttttgcttttcctttgtttttatgaagaaaaaatacattttatattagaagtgttaacttagcttgaaggatctgtttttaaaaatcataaactgtgtgcagactcaataaaatcatgtacatttctgaaatgacctcaagatgtcctccttgttctactcatatatatctatcttatatacttactattttacttctagagatagtacataaaggtggtatgtgtgtgtatgctactacaaaaaagttgttaactaaattaacattgggaaatcttatattccatatattagcatttagtccaatgtctttttaagcttatttaattaaaaaatttccagtgagcttatcatgctgtctttacatggggttttcaattttgcatgctcgattattccctgtacaatatttaaaatttattgcttgatacttttgacaacaaattaggttttgtacaattgaacttaaataaatgtcattaaaataaataaatgcaatatgtattaatattcattgtataaaaatagaagaatacaaacatatttgttaaatatttacatatgaaatttaatatagctatttttatggaatttttcattgatatgaaaaatatgatattgcatatgcatagttcccatgttaaatcccattcataactttcattaaagcatttactttgaatttc

SEQ ID NO: 50 - DNA, 481 bp, Artificial Sequence
  Description of Artificial sequences:primer
  misc_feature (1)..(481): 3' terminal sequence from clone image:117811. similar to [human ig rearranged gamma chain mrna, v-j-c region and complete cds.], gene product.
  misc_feature (12)..(12): n is a, c, g, or t
  misc_feature (60)..(60): n is a, c, g, or t
  misc_feature (378)..(378): n is a, c, g, or t
  misc_feature (386)..(386): n is a, c, g, or t
  misc_feature (423)..(423): n is a, c, g, or t
  misc_feature (463)..(463): n is a, c, g, or t
tgcaaagatttnctttatttattcattctcctccaacattagcataattaaagccaaggnggaggaggggggtgaggtgaaagatgagctggaggaccgcaataggggtaggtcccctgtggaaaaagggtcagaggccaaaggatgggagggggtcaggctggatctgaggagcaggtgggggcacttctccctctaacactctcccctgttgaagctctttgtgacgggcgagctcaggccctgatgggtgacttcgcaggcgtagactttgtgtttctcgtagtctgctttgctcagcgtcagggtgctgctgaggctgtagggtgctgtccttgctgtccctgctctgtgacactctcctggggagttaccccnatttgganggcgttatccaccttccactgtactttggcctctctngggatagaagttattcagcaggcacacaacagaggcattnccgattcactgcttcatc

SEQ ID NO: 51 - DNA, 451 bp, Artificial Sequence
  Description of Artificial sequences:primer
  misc_feature (1)..(451): 5' terminal sequence from clone image:117811. similar to [human ig rearranged gamma chain mrna, v-j-c region and complete cds.], gene product.
  misc_feature (33)..(33): n is a, c, g, or t
  misc_feature (93)..(93): n is a, c, g, or t
  misc_feature (418)..(418): n is a, c, g, or t
  misc_feature (428)..(428): n is a, c, g, or t
ccagacggaaccatggaagccccagcgcacttnctcttcctcctgctactctggctcccagataccactggagaaatagtgatgacgcagttnccagccaccctgtctgtgtctccaggggaaagagccaccctctcctgcagggccagtcagagtgttagcagcaacttagcctggtaccagcagaaacctggccaggctcccaggctcctcatctatggtgcatccaccagggccactggtatcccagccaggtttcagtggcagtgggtctgggacagagttcacttttcaccattcagcagcctgcagtctgaaggatttttgcagtttatttactgttcagcagttattgattaactgggcctccgattcacctttgggccaagggacacgacttggagatttaaacgaactntgggttgcancatctgtttttcatctttcccgt

SEQ ID NO: 52 - DNA, 398 bp, Artificial Sequence
  Description of Artificial sequences:primer
  misc_feature (1)..(398): 3' terminal sequence from clone image:1184178. chromosome 6 open reading frame 53(C6ORF53) gene.
ttttttttttattatttatagtaaactttattttcattgatatttcacttaacataatttcaaagtcagtctgtggtctaagatgagcaaaaaaacagatattgtaaatctcctaaaagactttttttcacactgttcctcagagcagggaatggggtttcagagccctgaaagctgacacctaactttttacccttgagatttacctacagatacagaaagaaaagacaacatcaatatacaagaatcaagctctatgagggtcttattaagctcttgtgttacatactcgccacctctgtaggtttgtaatcatgactgattttccacctctctgccaagtttggtgtctttttttttaggtaaaatgtcagatgcaaaaatgctgcacttatttc

SEQ ID NO: 53 - DNA, 1011 bp, Artificial Sequence
  Description of Artificial sequences:primer
  misc_feature (1)..(1011): chromosome 6 open reading frame 53(C6ORF53) gene.
ggcacaacagagccgctcccctctcctcgccccgccaccgggacgagaggcgcccgccgctgcatttccggcgacacctcgcagtcattcctgcggcttgcgcgcccttgtagacagccggggccttcgtgagaccggtgcaggcctggggtagtctcctgtctggacagagaagagaaaaatgcaggacactggctcagtagtgcctttgcattggtttggctttggctacgcagcactggttgcttctggtgggatcattggctatgtaaaagcaggcagcgtgccgtccctggctgcagggctgctctttggcagtctagccggcctgggtgcttaccagctgtctcaggatccaaggaacgtttgggttttcctagctacatctggtaccttggctggcattatgggaatgaggttctaccactctggaaaattcatgcctgcaggtttaattgcaggtgccagtttgctgatggtcgccaaagttggagttagtatgttcaacagaccccattagcagaagtcatgttccagcttagactgatgaagaattaaaaatctgcatcttccactattttcaatatattaagagaaataagtgcagcatttttgcatctgacattttacctaaaaaaaaagacaccaaacttggcagagaggtggaaaatcagtcatgattacaaacctacagaggtggcgagtatgtaacacaagagcttaataagaccctcatagagcttgattcttgtatattgatgttgtcttttctttctgtatctgtaggtaaatctcaagggtaaaatgttaggtgtcagctttcagggctctgaaaccctattccctgctctgaggaacagtgtgaaaaaaagtcttttaggagatttacaatatctgttcttttgctcatcttagaccacagactgactttgaaattatgttaagtgaaatatcaatgaaaataaagtttactataaataataaaaaaaaaaaaaaaaaaaaaaaaaaaaa

SEQ ID NO: 54 - DNA, 300 bp, Artificial Sequence
  Description of Artificial sequences:primer
  misc_feature (1)..(300): 3' terminal sequence from clone image:1185650. 3-phosphoinositide dependent protein kinase-1(PDPK1) gene.
ttttttttttttaaataaaaatgctgcaaggtttccgcctctgcgttccccttgtgatggctggcaggtggtctggaagcgtcccggatggcggccaagcgccttggggcatggtgtcctggcagcgaagggcagcccggccgcacgacgtcactgcacagcggcgtccgggtggctctggtatcgctgcctccaaacctcctggatcttcctgcaccacttgtgtgcgttcccgctggggtccatcagataatacgtcctgttaggcgtgtggacaaagaaagttttaaaattcttggc

SEQ ID NO: 55 - DNA, 1891 bp, Artificial Sequence
  Description of Artificial sequences:primer
  misc_feature (1)..(1891): 3-phosphoinositide dependent protein kinase-1(PDPK1) gene.
ccgcttcggggaggaggacgctgaggaggcgccgagccgcgcagcgctgcgggggaggcgcccgcgccgacgcggggcccatggccaggaccaccagccagctgtatgacgccgtgcccatccagtccagcgtggtgttatgttcctgcccatccccatcaatggtgaggacccagactgagtccagcacgccccctggcattcctggtggcagcaggcagggccccgccatggacggcactgcagccgagcctcggcccggcgccggctccctgcagcatgcccagcctccgccgcagcctcggaagaagcggcctgaggacttcaagtttgggaaaatccttggggaaggctctttttccacggttgtcctggctcgagaactggcaacctccagagaatatgcgattaaaattctggagaagcgacatatcataaaagagaacaaggtcccctatgtaaccagagagcgggatgtcatgtcgcgcctggatcaccccttctttgttaagctttacttcacatttcaggacgacgagaagctgtatttcggccttagttatgccaaaaatggagaactacttaaatatattcgcaaaatcggttcattcgatgagacctgtacccgattttacacggctgagatcgtgtctgctttagagtacttgcacggcaagggcatcattcacagggaccttaaaccggaaaacattttgttaaatgaagatatgcacatccagatcacagattttggaacagcaaaagtcttatccccagagagcaaacaagccagggccaactcattcgtgggaacagcgcagtacgtttctccagagctgctcacggagaagtccgcctgtaagagttcagacctttgggctcttggatgcataatataccagcttgtggcaggactcccaccattccgagctggaaacgagtatcttatatttcagaagatcattaagttggaatatgactttccagaaaaattcttccctaaggcaagagacctcgtggagaaacttttggttttagatgccacaaagcggttaggctgtgaggaaatggaaggatacggacctcttaaagcacacccgttcttcgagtccgtcacgtgggagaacctgcaccagcagacgcctccgaagctcaccgcttacctgccggctatgtcggaagacgacgaggactgctatggcaattatgacaatctcctgagccagtttggctgcatgcaggtgtcttcgtcctcctcctcacactccctgtcagcctccgacacgggcctgccccagaggtcaggcagcaacatagagcagtacattcacgatctggactcgaactcctttgaactggacttacagttttccgaagatgagaagaggttgttgttggagaagcaggctggcggaaacccttggcaccagtttgtagaaaataatttaatactaaagatgggcccagtggataagcggaagggtttatttgcaagacgacgacagctgttgctcacagaaggaccacatttatattatgtggatcctgtcaacaaagttctgaaaggtgaaattccttggtcacaagaacttcgaccagaggccaagaattttaaaactttctttgtccacacgcctaacaggacgtattatctgatggaccccagcgggaacgcacacaagtggtgcaggaagatccaggaggtttggaggcagcgataccagagccacccggacgccgctgtgcagtgacgtggcctgcggccgggctgcccttcgctgccaggacacctgccccagcgcggcttggccgccatccgggacgcttccagaccacctgccagccatcacaaggggaacgcagaggcggaaaccttgcagcatttttattt

SEQ ID NO: 56 - DNA, 427 bp, Artificial Sequence
  Description of Artificial sequences:primer
  misc_feature (1)..(427): 3' terminal sequence from clone image:118634. similar to [human ig rearranged gamma chain mrna, v-j-c region and complete cds.], gene product.
  misc_feature (10)..(11): n is a, c, g, or t
  misc_feature (317)..(317): n is a, c, g, or t
  misc_feature (393)..(393): n is a, c, g, or t
  misc_feature (405)..(405): n is a, c, g, or t
tttttacaanntgcaaagattcactttatttattcattctcctccaacattagcataattaaagccaaggaggaggaggggggtgaggtgaaagatgagctggaggaccgcaataggggtaggtcccctgtggaaaaagggtcagaggccaaaggatgggagggggtcaggctggaactgaggagcaggtgggggcacttctccctctaacactctcccctgttgaagctctttgtgacgggcgagctcaggccctgatgggtgacttcgcaggcgtagactttgtgtttctcgtagtctgctttgctcagcgtcanggtgctgctgaggctgtaggtgctgtccttgctgtcctgctctgtgacactctcctggggagttacccgatttganggccttatccancttccactgtactttggcctct

SEQ ID NO: 57 - DNA, 400 bp, Artificial Sequence
  Description of Artificial sequences:primer
  misc_feature (1)..(400): 5' terminal sequence from clone image:118634. similar to [human ig rearranged gamma chain mrna, v-j-c region and complete cds.], gene product.
  misc_feature (293)..(293): n is a, c, g, or t
  misc_feature (347)..(347): n is a, c, g, or t
  misc_feature (352)..(352): n is a, c, g, or t
  misc_feature (367)..(367): n is a, c, g, or t
  misc_feature (377)..(377): n is a, c, g, or t
  misc_feature (394)..(394): n is a, c, g, or t
caccatctgtcttcatcttcccgccatctgatgagcagttgaaatctggaactgcctctgttgtgtgcctgctgaataacttctatcccagagaggccaaagtacagtggaaggtggataacgccctccaatcgggtaactcccaggagagtgtcacagagcaggacagcaaggacagcacctacagcctcagcagcaccctgacgctgagcaaagcagactacgagaaacacaaagtcttacgcctgcgaagtcacccattcagggccttgagctcgcccgtcacaaagagnttcaacaaggggagatttttagagggagaaggtgcccccaacttgtttcttaanttccngcttgaacccttccntcctttgggntttgaaccttttttcanaaggtt

SEQ ID NO: 58 - DNA, 387 bp, Artificial Sequence
  Description of Artificial sequences:primer
  misc_feature (1)..(387): 3' terminal sequence from clone image:119530. potassium inwardly-rectifying channel, subfamily j, member 15(KCNJ15) gene.
  misc_feature (269)..(269): n is a, c, g, or t
  misc_feature (279)..(279): n is a, c, g, or t
  misc_feature (359)..(359): n is a, c, g, or t
  misc_feature (365)..(365): n is a, c, g, or t
acaatttgaattatgagagttcactttcagacgaagcacctaacaggaaatctctcaaacacagaaatgctggtttagccacaagatcaaaggaaaagattgattttgtatgtccgtgcagtttttgagagtgcgtctacacattttcgttttcacagcaatctttgtgtttgaagggagttctgatgtggaaacagcttgcagggttaaacctggatggcgcccctgtgatcagacattgctctgttgtaataaaagtgtcctcagtnctctttcccnctgatcctcctgcctgtacttctcctcgagttgctgtttctcagaatctgcacagtaaaatgtgccaatctggggctttnccgaanccggttcaaactgactgaaatc

SEQ ID NO: 59 - DNA, 386 bp, Artificial Sequence
  Description of Artificial sequences:primer
  misc_feature (1)..(386): 5' terminal sequence from clone image:119530. potassium inwardly-rectifying channel, subfamily j, member 15(KCNJ15) gene.
ggagtttgagcttgtggtcctcctcaatgccactgtggaatccaccagcgctgtctgccagagccgaacatcttatatcccagaggaaatctactggggttttgagtttgtgcctgtggtatctctctccaaaaatggaaaatatgtggctgatttcagtcagtttgaacagattcggaaaagcccagattgcacattttactgtgcagattctgagaaacagcaactcgaggagaagtacagggcaggaggatcagagggaaagagaactgagggacatttttatttacaacagaggcaatgttctggattcacagggggcgccatccagggttttaaccctggcaagctgttttccacattcagaacttccctttcaaaacaca

SEQ ID NO: 60 - DNA, 2919 bp, Artificial Sequence
  Description of Artificial sequences:primer
  misc_feature (1)..(2919): potassium inwardly-rectifying channel, subfamily j, member 15(KCNJ15) gene.
ctcctctgcccaatgtctcccaatctctttcctttctctcttcagttcctccaggtaattcttactcaaacttgtaccaacttgtttttgactgacagtgaacagtgagagagttttcttcattttgaggaaccctaaacacctatctttcccaaggcaacctgtctggactgagcatttctctgacttgacataacttcccatccagccaggagtctgcactcttcagtctttgcaggcagtagcagaatcccatggtagccaggtgggtgaaggggagcgaggacgttctacctgccttgaagaagacacctgacctgcggagtgagtgaccagtgtttccagagcctggcaatggatgccattcacatcggcatgtccagcacccccctggtgaagcacactgctggggctgggctcaaggccaacagaccccgcgtcatgtccaagagtgggcacagcaacgtgagaattgacaaagtggatggcatatacctactctacctgcaagacctgtggaccacagttatcgacatgaagtggagatacaaactcaccctgttcgctgccacttttgtgatgacctggttcctttttggagtcatctactatgccatcgcgtttattcatggggacttagaacccggtgagcccatttcaaatcataccccctgcatcatgaaagtggactctctcactggggcgtttctcttttccctggaatcccagacaaccattggctatggagtccgttccatcacagaggaatgtcctcatgccatcttcctgttggttgctcagttggtcatcacgaccttgattgagatcttcatcaccggaaccttcctggccaaaatcgccagacccaaaaagcgggctgagaccatcaagttcagccactgtgcagtcatcaccaagcagaatgggaagctgtgcttggtgattcaggtagccaatatgaggaagagcctcttgattcagtgccagctctctggcaagctcctgcagacccacgtcaccaaggagggggagcggattctcctcaaccaagccactgtcaaattccacgtggactcctcctctgagagccccttcctcattctgcccatgacattctaccatgtgctggatgagacgagccccctgagagacctcacaccccaaaacctaaaggagaaggagtttgagcttgtggtcctcctcaatgccactgtggaatccaccagcgctgtctgccagagccgaacatcttatatcccagaggaaatctactggggttttgagtttgtgcctgtggtatctctctccaaaaatggaaaatatgtggctgatttcagtcagtttgaacagattcggaaaagcccagattgcacattttactgtgcagattctgagaaacagcaactcgaggagaagtacaggcaggaggatcagagggaaagagaactgaggacacttttattacaacagagcaatgtctgatcacaggggcgccatccaggtttaaccctgcaagctgtttccacatcagaactcccttcaaacacaaagattgctgtgaaaacgaaaatgtgtagacgcactctcaaaaactgcacggacatacaaaatcaatcttttcctttgatcttgtggctaaaccagcatttctgtgtttgagagatttcctgttaggtgcttcgtctgaaagtgaactctcataattcaaattgtataaaataaagctacatttctaagagcttggtgtagggcaattggaataatgtcctgttagataaacagacatttagcaatcctgacattaaaaggaaatgtatttctatacaagattattagctgtaatacaagatatttatttaaccaatgaccttatggctgagagttgaattgtggttcagtattcattgatctcactgctttaaaacatgctctttttgttcaagcaggaaaaatattatatctaattatgtctatgtggtaatacctaaaaagaggtagagagactctatgttcacaaaatatagtaatttcatttttacctttcttcagtggactgaattgtatggaaggaaattgatcagatctgtaattcacaactgtggaaacctacacaaatggggctgatgccattgtttcctctattttattttatttatttttgaatccactatctctttccattcaaaatatttccattcaaaatgtggttcacagacccgccacatcagcaccatccgagagcttattagtaatgtgtagattctcatgtcccagccagacttacagaattggggtctgtatcttaacaagaaccccagatgatttgtgtacaaatgaaagttcgaaagctgtgctctggacagtgttctcaaagcaactttctgaagccgtgtggaaaactgactctgtgtgggtcccgtatccctgtggcatccagacctggcctctcttcatttcattattattggccaatatttctttcagccatttcatttcttatctattaaaatggcttgcccataaaggaactgcataggattatcccctgacattccaagagcaaaataaagctcttgagagtaattgttgtctcagtcatgcttgctgattacagttagcacaaaagaaaaattcagctgcctgacaatacaggaaatgttctcagatgctgatgtttgtaaggtccggtggggccatgaggaagaagaggagctgaaggtaagaaactcataaacaagatgactctttgatgcatgaacaagatttgaaaatctcaagcctgtaaagaatacccctgctatttaaataaagctcataccaagaggtaacattttgccccgggccaaattcaggggtctagtgccctgcattcctttgaggcaaaaaataaatgggctatgactggttaaatgtccaaaa

SEQ ID NO: 61 - DNA, 228 bp, Artificial Sequence
  Description of Artificial sequences:primer
  misc_feature (1)..(228): 3' terminal sequence from clone image:119772. loc284066.
  misc_feature (169)..(169): n is a, c, g, or t
  misc_feature (203)..(203): n is a, c, g, or t
  misc_feature (218)..(218): n is a, c, g, or t
ggaaacacacttgtaccctgctcccagcatcacaaggcacttgtctacaagtgtgtcccaacacagtcctgggccactttccccaccctgggagcacataaagaagcttgccaaggggggcgtccttgctccccagttgtcctgtttctgtaacttatgatgtcttttncctgagatgggggctcagagggggaaggcctgtnctgcattgcttcccnatggcccacg

SEQ ID NO: 62 - DNA, 404 bp, Artificial Sequence
  Description of Artificial sequences:primer
  misc_feature (1)..(404): 3' terminal sequence from clone image:120009. ubiquitin specific protease 9, x chromosome (fat facets-like drosophila)(USP9X) gene.
  misc_feature (372)..(372): n is a, c, g, or t
tcaggccatttattacaaaacactatacactttccactgcaggcgggttatatattgacagcaaatttctgcagataagacagtgaataaactctccactccatgttgattaggaatagtttttctagttttaaatattagccagacacagaaaaaggttggactgtaaggcctgggtgcacagtcttgatggaaccagttaattatgtgcatttcattgatccttggtttgaggtggggatacttcttcactgccttcataattttcttgtgctcgttggccagttctctgagggttgttcatgtgatgtgctgctgggcctgtatatggctgtccatgcacatgggttattctgttgatactgagatccngggtgaatggggggtacaatgggggcatcttc

SEQ ID NO: 63 - DNA, 415 bp, Artificial Sequence
  Description of Artificial sequences:primer
  misc_feature (1)..(415): 5' terminal sequence from clone image:120009. ubiquitin specific protease 9, x chromosome (fat facets-like drosophila)(USP9X) gene.
  misc_feature (312)..(312): n is a, c, g, or t
  misc_feature (337)..(337): n is a, c, g, or t
  misc_feature (342)..(342): n is a, c, g, or t
  misc_feature (373)..(373): n is a, c, g, or t
ttttagtaactgtcctgttgcttaccaaatcctgcagggcaatggagatcttaaaagaaagtggacctgggcagtggaatggcttggagatgaacttgaaagaagaccatatactggcaatcctcagtacacttacaacaatttgtctcccccagtgcaaagcaatgaaacgtccaatggttatttcttggagagatcacatagtgctaggatgacacttgcaaaagcttgtgaactctgtccagaggagggagccagatggaccaaggatgctccagatggaacatggagttcgcctccacctggaaggtngccccatttgttaccccctttcacnggggntttcagtattcaacaggattaaccctgttgnctggggacaggccttattatcagggcccagcaggcacttcac

SEQ ID NO: 64 - DNA, 8171 bp, Artificial Sequence
  Description of Artificial sequences:primer
  misc_feature (1)..(8171): ubiquitin specific protease 9, x chromosome (fat facets-like drosophila)(USP9X) gene.
cttttctcaagacaactacataagcagacaaaattgcaaagatctgccctgtgtcgagtatgacagccacgactcgtggctctccggtcggagggaatgacaaccagggccaggctcctgatggacagtctctgccccccctccaacagaatcagacttcatcgcctgattcttccaatgaaaattccccggcaactcccccagatgagcaaggtcaaggtgatgccccaccacagcttgaagatgaggaacctgcatttccacatactgacttggccaagttggatgacatgatcaacaggcctcgatgggtggttccagttttgccgaaaggggaattagaagtgcttttagaagctgctattgatcttagtaaaaagggccttgatgttaaaagtgaagcatgtcagcgatttttccgtgatgggctaacaatatcattcactaaaattcttacagatgaagcagtgagtggctggaagtttgaaattcataggtgtctggtggagctatgtgtggccaagttgtcccaagactggtttccacttttagaacttcttgccatggccttaaatcctcattgcaaattccatatctacaatggtacacgtccatgtgaatcagtttcctcaagtgttcagttgcctgaagatgaactctttgctcgttctccagatcctcgatcaccaaagggttggctagtggatcttctcaacaaatttggcactttaaatgggttccagattttgcatgatcgttttattaatggatcagcattaaacgttcaaataattgcagcccttattaaaccatttgggcaatgctatgagtttctcactcttcatacagtgaaaaagtactttcttccaataatagaaatggttccacagtttttagaaaacttaactgatgaagaactgaaaaaagaagcaaagaatgaagccaaaaatgatgctctttcaatgattattaaatctttgaagaatttagcttcaagggttccaggacaagaagaaactgttaaaaacttagaaatatttaggttaaaaatgatacttagattattgcaaatttcttctttcaatggaaagatgaatgcactgaatgaagttaataaggtgatatctagtgtatcatactatactcatcgacatggtaatcctgaggaggaagagtggctcacagctgaacgaatggcagaatggatacagcagaacaatatcttatccatagtgttgcgagatagtcttcatcagccacagtatgtagaaaagttagagaagattcttcgttttgtcatcaaagaaaaagctctgaccttacaggatcttgataatatctgggcagcacaggcagggaaacatgaagccattgtgaagaatgtacatgatctcctggcaaaattggcatgggatttttctcctgaacaacttgatcatccttttgattgttttaaggccagtcggacaaatgcgagtaaaaagcaacgtgaaaagctacttgagctgatacgtcgtcttgcagaagatgataaagatggtgtgatggcacacagagtgttgaaccttctgtggaatctggctcacagtgatgatgtgcctgtagatatcatggacctggctctcagtgcccacataaaaatactagattacagttgctcccaggaccgtgatacacaaaagatccaatggatagatcgctttatagaagaacttcgcacaaatgacaaatgggttattcccgcactgaaacaaattagagaaatttgtagtttgtttggtgaagcgcctcaaaatttgagtcaaactcagcgaagtccccatgtgttttatcgccatgacttaatcaatcaacttcaacacaatcatgccctagttactttggtagcagaaaaccttgtaacttacatggaaagcatgagactatatgctagagaccatgaagattatgacccacaaactgtgaggctgggaagtagatatagtcatgttcaagaagttcaagaacggcttaacttccttagatttttattgaaggatggtcagctgtggctatgtgctcctcaggcaaaacaaatatggaaatgcttagctgagaatgcagtttacctttgtgatcgtgaagcctgttttaagtggtattccaagttgatgggggatgaaccagacttagatcctgatattaataaggacttctttgaaagtaatgtgcttcagcttgatccttctctgttaactgaaaatggaatgaagtgttttgagcgattcttcaaagctgtgaattgtcgagaaggaaaactagtagcaaaaaggagagcctatatgatggatgacttggagttaataggattagattacctttggagggtcgtgattcagagtaatgatgatattgccagcagagctatagatctcctcaaagagatatacacgaaccttggtccaagactacaagtcaatcaggtggtgatccatgaagacttcattcagtcttgttttgatcgtctgaaggcttcctatgacacattgtgtgttttggatggtgacaaagacagtgttaattgtgcaagacaggaagctgttcgaatggttcgagtattaactgttttaagggaatatataaatgaatgtgacagtgattatcatgaggaaagaacaattctccctatgtcgagagcattccgcggtaaacacctctcttttgtagttcgatttccaaaccagggcagacaggttgatgacttggaggtatggtctcatacaaatgatacaattggttcagtacgacgatgtattctcaatcgtattaaagccaacgtagcccatacaaaaattgagctctttgtgggcggtgagctgatagatcctgcagatgatagaaagttgattggacaattaaacttaaaagataaatcgcttattacagccaaacttacacagataagttccaatatgccttcaagccctgatagctcttctgattcctccactggatctcctggaaaccatggtaatcattacagtgatggtcccaatccagaagtggaaagctgtttgcctggagtgataatgtcactgcatcccagatacatctcttttctttggcaagttgcagacttaggtagcagcctaaatatgccaccccttagagatggagcaagagtacttatgaaacttatgccgccagatagcacaacgatagaaaaattaagagctatttgtttagaccatgccaaacttggagaaagcagccttagtccatctcttgactcacttttctttggtccttcagcctcacaagtgctatatctaacagaggtagtctatgccttgttaatgcctgctggtgcacctctggctgatgattcctctgattttcagtttcacttcttgaaaagtggtggcctaccccttgtactgagtatgctaaccagaaataacttcctaccgaatgcagatatggaaactcgaaggggtgcctacctcaatgctcttaaaatagccaagcttttgctaactgccattggctatggtcatgttcgagctgtggcagaagcttgtcagccaggtgtagaaggtgtgaatcccatgacacagatcaaccaagttacccatgatcaagcagtggtgctacaaagtgcccttcagagcattcctaatccatcatccgagtgcatgcttagaaatgtgtcagttcgtcttgctcagcagatatctgatgaggcttcaagatatatgcctgatatttgtgtaattagagctatacaaaaaattatctgggcatcaggatgtgggtcgttacagctagtatttagcccaaatgaagaaatcactaaaatttatgagaagaccaatgcaggcaatgagccagacttggaagacgaacaggtttgctgtgaagcattggaagtgatgaccttatgttttgccttgattccaacagccttagatgctcttagtaaagaaaaggcttggcagacattcatcattgacttactattgcactgtcacagcaaaactgttcgtcaggtggcacaggagcagttctttttaatgtgcaccagatgttgcatgggacaccggcctctacttttcttcattactctactctttactgttttggggagcacagcaagagagagagctaaacactcaggcgactactttactcttttaagacaccttcttaattacgcttacaatagtaatattaatgtacccaatgctgaagttcttttcaataatgaaattgattggcttaaaagaattagggatgatgttaaaagaacaggagaaacgggtattgaagagacgatcttagagggccaccttggagtgacaaaggagttactggcctttcaaacttctgagaaaaaatttcatattggttgtgaaaaaggaggtgctaatctcattaaagaattaattgatgatttcatatttcctgcatccaatgtttacctacagtatatgagaaatggagagcttccagctgaacaggctattccggtctgtggttcaccacctacaattaatgctggttttgaattacttgtagcattagctgttggctgtgtgaggaatctcaaacaaatagtagattctttgactgaaatgtattacattggcacagcaataactacttgtgaagcacttactgagtgggaatatctgccacctgttggaccccgcccacccaaaggattcgtggggctgaaaaatgccggtgctacttgttacatgaattctgtgattcagcaactctacatgattccttccattaggaacggtattcttgccattgaaggcacaggtagtgatgtagatgatgatatgtctggggatgagaagcaggacaatgagagcaatgttgatcccagggatgatgtatttggatatcctcaacaatttgaagataaaccagcattaagtaaaactgaagatagaaaagagtacaacattggtgtcctaagacaccttcaggtcatctttggtcatttagctgcttctcgactgcaatactatgtgcccagaggattttggaaacagttcaggctttggggtgagcctgttaatctgcgtgaacaacacgatgctttagaattttttaattcattggtggatagtttagatgaagctttaaaagctttaggacatccagctatgctaagtaaagtcttaggaggttcctttgctgatcagaagatctgccaaggctgcccacataggtacgaatgtgaagaatcttttacgaccctaaacgtagacattagaaatcaccaaaatcttcttgattctttggaacagtatgtcaaaggagatttactagaaggtgcaaatgcatatcattgtgaaaaatgcaataaaaaggttgataccgtaaagcgcttgctgattaaaaaattacctcctgttcttgctatacaactaaagcgatttgactatgactgggaaagagaatgtgcaatcaagttcaatgattattttgaatttcctcgagagctggacatggaaccttacacagttgcaggtgtcgcaaagctggaaggggataatgtaaacccagagagtcagttgatacaacagagtgagcagtctgaaagtgagacagcaggaagcacaaaatacagacttgtgggtgtgctcgtacacagtggtcaagcgagtggggggcattattattcttacatcatccaaaggaatggtggagatggtgagagaaatcgctggtataaatttgatgatggtgatgtaacagaatgtaaaatggatgatgacgaagaaatgaaaaaccagtgttttggtggagagtacatgggagaagtgtttgatcacatgatgaagcgtatgtcatacaggcgccagaaaaggtggtggaatgcttatatacctttttatgaacgaatggacacaatagaccaagatgatgagttgataagatatatatcagagcttgctatcaccaccagacctcatcagattattatgccatcagccattgagagaagtgtacggaaacagaacgtacaattcatgcataaccgaatgcagtacagtatggagtattttcagtttatgaaaaaactgcttacatgtaatggcgtttacttaaaccctcctcccgggcaagatcacctgttgcctgaagcagaagaaatcactatgatcagtattcaacttgctgctaggttcctctttactacaggatttcacacaaagaaagtagtccgtggctctgccagtgattggtatgatgcattgtgtattctccttcgtcacagcaagaatgtacgtttttggtttgctcataacgtcctttttaatgtttcaaatcgcttctccgaataccttctggagtgccctagtgcagaagtgaggggtgcgtttgcaaaacttatagtctttattgcacatttttccttgcaagatgggccatgtccttcaccttttgcctctcctggaccttctagtcaggcttatgacaacttaagcttgagtgatcacttactaagagcagtactaaatctcttgagaagggaagtttcagagcatgggcgtcatttacagcagtatttcaacctgtttgtaatgtatgccaatttaggtgtggcagagaagacacagcttctgaaattgagtgtacctgctacttttatgcttgtgtctttagatgaaggtccaggtcctccaatcaaataccagtatgctgaattaggcaaattatactcagtagtgtcacagctgatccgctgttgcaatgtctcttcaagaatgcagtcttcaatcaatggtaatcctcctcttcccaatccttttggtgatcctaatttatcacaacctataatgccaattcagcagaatgtggcagacattttatttgtgagaacaagttatgtgaagaaaatcattgaagactgcagtaattcagaggaaaccgtcaaattgcttcgtttttgctgctgggagaatcctcagttctcatctactgtcctcagtgaacttctctggcaggttgcatattcctatccctatgaactgcggccctatttggatctgcttttgcaaatcttactgattgaggactcctggcaaactcacagaattcataatgcactgaaaggaattccagatgaccgagatgggctgtttgacacaatccagcgctctaagaatcactatcaaaaaagagcataccagtgtataaaatgtatggtagctctatttagtaactgtcctgttgcttaccaaatcctgcagggcaatggagatcttaaaagaaagtggacctgggcagtggaatggcttggagatgaacttgaaagaagaccatatactggcaatcctcagtacacttacaacaattggtctcccccagtgcaaagcaatgaaacgtccaatggttatttcttggagagatcacatagtgctaggatgacacttgcaaaagcttgtgaactctgtccagaggaggtaaaaaaagccaccagtgtgcagcagatagaaatggaagagagcaaagagccagatgaccaagatgctccagatgaacatgagtcgcctccacctgaagatgccccattgtacccccattcacctggatctcagtatcaacagaataaccatgtgcatggacagccatatacaggcccagcagcacatcacatgaacaaccctcagagaactggccaacgagcacaagaaaattatgaaggcagtgaagaagtatccccacctcaaaccaaggatcaatgaaatgcacataattaactggttccatcaagactgtgcacccaggccttacagtccaacctttttctgtgtctggctaatatttaaaactagaaaaactattcctaatcaacatggagtggagagtttattcactgtcttatctgcagaaatttgctgtcaatatataacccgcctgcagtggaaagtgtatagtgttttgtaataaatggcctgatgctaatgtgtaaatggcaaaggtgtatatagtatattaatgttgactgttaattcttaagcaagaaacttttttcttgatgagactcacagatctacacaaactacaaaagttaattttcttgttacacccactgcactctgcaaccagtgttgcctgcctcatggcagttggatcagctcctttacaaaaaagaaaaaaaaaaa

SEQ ID NO: 65 - DNA, 349 bp, Artificial Sequence
  Description of Artificial sequences:primer
  misc_feature (1)..(349): 3' terminal sequence from clone image:120572. helicase with zinc finger domain(HELZ) gene.
  misc_feature (271)..(271): n is a, c, g, or t
  misc_feature (348)..(348): n is a, c, g, or t
ctcgtgctgtaaagaaagttagtgggtagaaatctttgtgtgctggctgcttcccactggccatcagtttgccctcatagaaaagctcagaggtataattgatgatagcttcatgggagcggtagttctcacacaggagaatcctacatgggaactcagcagggtaatgctcatagagtcggtcaagtaatgaaacgtgaaggtttctctccctgggcaaactcgctgtaaacaaaaggactgagctgcatgtgatcaccagccaagacantccgagtgttttgagttgctaatgctagaggcataatgggtttcacactccatgggcctggggcagctttcatctant

SEQ ID NO: 66 - DNA, 6274 bp, Artificial Sequence
  Description of Artificial sequences:primer
  misc_feature (1)..(6274): helicase with zinc finger domain(HELZ) gene.
gaaagtaatgacaggatttggatgaagtaatggatcactaatgaactacagtgctggtgagatgtgtaagaaattataaagagctctgatgggctatttgggtgatacccagtgcagtgaactgcaggatttttgtccctgagtcatggaagacagaagagctgaaaagtcatgtgaacaagcatgtgaatcacttaagaggcaggactatgaaatggccctcaagcactgcacagaggcccttctttctcttggccagtactccatggcagacttcacagggccttgtccattggaaatagaacgcatcacaatcgagagtcttctctacagaattgcctcatttttgcaactgaaaaattatgtgcaagctgatgaagattgtagacatgtgctgggagaaggactggccaagggagaagatgcctttcgggcagtgctttgctgcatgcagctgaaagggaagctccaacctgtatccaccattcttgccaagtcactcacaggagagtccctgaatgggatggtaacaaaggatttgacaagactaaaaacacttctctcagaaacagagacagcaactagtaacgccctctctggatatcacgtggaagacttagatgaggggtcttgtaatggttggcatttccgcccaccacctaggggaatcacaagcagcgaggaatatactttgtgtaaaagatttttagaacaaggaatctgtaggtatggtgcccagtgtacttcagcacattcccaggaagaactagcagaatggcagaaaagatatgcttcacggctgataaaattgaaacagcaaaatgagaataaacagctctcaggcagttacatggaaaccttgatagaaaagtggatgaattcattgtctcctgagaaagtgcttagtgaatgtatagaaggagtaaaggtagagcacaatcctgacctgtcagttactgtcagcaccaaaaaatcccaccagacatggacctttgctctcacttgtaagcctgcaagaatgctgtatcgtgtagcattgctttatgatgctcatcgtcctcattttagtatcattgcaatatctgccggagatagtactacccaggtatcacaagaagtcccagaaaactgtcaagaatggataggaggaaagatggcccaaaatggattagatcattacgtgtataaagtcgggatagcatttaacacagaaatatttggaacttttcgccaaaccatagttttcgactttggattggaaccagtactcatgcaaagagtaatgattgatgcagcttctacagaagatctcgaatacctgatgcatgcaaaacagcagctagtaaccacagctaaacgttgggattcttcctctaagactattatagattttgaacctaatgaaactactgatttggagaagagccttcttatcagataccaaattcccctctctgctgaccagctatttactcagtccgttttagacaaatcattgaccaagagcaactatcagtcacggttacatgaccttctttatattgaggagatagcccagtataaagaaatcagcaagttcaaccttaaagtgcaattgcagattctggcaagcttcatgctcactggtgtttctggaggtgcaaagtatgctcagaatggacaactttttggtcgctttaagcttactgaaacactttctgaagatactttggctggacgactggtgatgaccaaagtcaatgctgtttatttattaccagtccctaaacagaagttagtacagacccagggaaccaaagagaaggtttatgaagctactattgaagaaaaaacaaaggaatatatatttttaaggctatctagggaatgctgtgaagaacttaatcttcggcctgactgtgacacacaggttgaacttcagtttcaattaaatcgattacccctctgtgaaatgcactatgcactagacaggatcaaggacaatggggttttgtttccagacatcagtatgactcccaccataccatggagtcctaacagacaatgggatgaacagttggatcctcgactaaatgcaaaacagaaagaggctgttctggccattaccactccacttgcaatccagctgccgcctgtgcttatcatcggaccctatgggacaggcaaaacgttcactctagctcaggctgtcaaacatattctgcagcaacaggagactaggattctcatttgcacccattctaatagtgctgctgatctctacataaaggattatttacatccatatgtagaagcaggcaatccccaggcaagacctctcagggtatatttcagaaatcgctgggtaaagactgtccacccagttgtgcatcagtactgtttgatctcaagcgcacattccacctttcagatgccccagaaagaagatattcttaaacatcgagtggtggttgttaccttgaatacttcccagtacctctgtcagttggaccttgaacctgggttttttacacacattctattagatgaagctgcccaggccatggagtgtgaaaccattatgcctctagcattagcaactcaaaacactcggattgtcttggctggtgatcacatgcagctcagtccttttgtttacagcgagtttgccagggagagaaaccttcacgtttcattacttgaccgactctatgagcattaccctgctgagttcccatgtaggattctcctgtgtgagaactaccgctcccatgaagctatcatcaattatacctctgagcttttctatgagggcaaactgatggccagtgggaagcagccagcacacaaagatttctacccactaactttctttacagcacgaggagaagatgtacaagaaaaaaatagcacagctttttataataatgcagaggtgtttgaagtggtggaacgtgtagaagagttaagaaggaagtggccagtagcgtgggggaagttagatgatggcagtattggtgtggtgactccatatgctgatcaagtgtttagaatacgtgctgaacttcgaaaaaagagattatctgatgttaatgtagaaagggtgctaaatgttcaaggaaagcaattcagagttttgtttcttagcacagtacgtacaagacatacttgtaaacataaacagacaccaattaaaaagaaagagcaacttctggaagattccacagaggacttagattatggttttttatctaactacaagcttctcaatactgccatcacaagagcacaatccctggttgctgtggtgggtgatcccattgctctgtgctctattggaagatgcaggaaattttgggaacggtttattgccctgtgtcatgaaaacagtagcctacatggaatcacttttgaacagatcaaagcccagttagaggctttagaactaaagaagacatatgtgttgaatccgctggcacctgaatttatcccccgggctctaagactgcagcattcaggaagtaccaacaaacagcagcaatcaccacccaaggggaaaagtcttcatcatacccagaatgatcacttccagaatgatggaattgttcagcccaatccttctgtacttattggcaatcctattagagcatatactcctccaccccctcttggacctcacccaaatttgggaaaatctccaagccctgttcaaagaatagatcctcacactgggacaagtattctttatgtacctgctgtctatggagggaatgtagttatgtcggtgcctttacctgtaccatggacaggataccagggtaggtttgcagttgatcctcgaattattacacatcaggcagcaatggcctataacatgaacctattacagacacatggacgaggatctcctattccttatggccttggacatcacccacctgtcaccataggccagccacaaaatcagcatcaggagaaggatcaacatgagcaaaatcgaaatggtaaaagtgatacaaataattccggacctgaaattaataagattcgaacaccagagaaaaagccaacagaaccaaaacaggttgatttggaatcaaatccacagaacagaagtcctgaatcacgtcctagtgttgtttatcccagtaccaaatttcctcgcaaagataatctcaacccaagacacataaatcttccccttcctgctccccacgcacagtatgcaatccctaatcgccactttcatccccttccccagctaccaagaccaccctttccaattccacagcagcacaccttgttaaatcagcagcagaataatttgcctgaacaaccaaatcagataccacctcagccaaatcaggtagtccagcagcaaagtcagttgaatcagcagcctcagcagccacctcctcagctttctcctgcatatcaggcgggacccaacaatgctttttttaatagtgcagttgctcatcggccacagtctcctcctgcagaagctgtaattccggagcagcagccccctcccatgctgcaagaaggccacagtcctctgagagccattgcacaacccggccccattcttccttcacatctgaatagcttcattgatgagaacccctcgggattacctataggggaggctttagatcgtatacatgggagtgtcgctctggaaacattaaggcagcagcaggcacggttccagcagtggagcgagcatcatgcctttctcagtcagggcagcgttccatacccacaccatcaccatcctcacctccagcatcttcctcagccgcccctgggattacatcagccgccagtgagggcagactggaagctcaccagcagtgccgaagatgaagtggagaccacatactcaaggtttcaagacttaatcagagaactgtctcatcgtgatcaaagtgaaacacgggaactagctgaaatgccaccacctcaatcaagacttttgcaatatagacaagtacagagtagaagcccaccagcagtcccatctcccccatccagtacagaccacagtagccacttttctaactttaatgataacagcagagacattgaagtagccagcaacccagcatttccacagcgcctcccaccccagatattcaactcacctttctcgttgccatctgaacaccttgcccctcctcccttgaaatacctggcacctgatggagcatggacttttgctaacttgcaacagaatcacctaatggggccaggttttccctatggcctacctccattgcctcacaggccaccgcagaacccttttgtacaaatacagaatcatcaacatgctattggtcaagagccatttcacccattgtcatctcgaacagtatcttcttcttcgctccctagcttagaagagtatgagcccagaggacctggtcggcccttgtaccaaagaagaatctcatctagctcagttcaaccttgttctgaagaagtaagcactcctcaagacagtctggctcagtgtaaagagcttcaggaccacagtaaccaatcttctttcaacttttcatccccggagtcctgggtaaacaccacctcatctactccttatcagaacattccgtgcaatggatccagcaggacagctcagcccagagagttgatagcgccacccaagactgtcaaaccccctgaggatcaactgaagtcggagaacctcgaggtgtccagttccttcaactacagtgtgctgcagcatcttggccagtttccaccccttatgcctaacaagcagatcgcggagtcggccaatagcagtagcccccagagctctgcggggggcaagcccgccatgtcctatgccagcgctctgcgggcccctccaaagcccaggccccctcctgagcaggccaagaagagtagcgaccctctgtctctcttccaggaactgagcctagggagctcatctggcagcaatggcttttactcatattttaaataatcacttttttttccctcaagggagaatgttttaatttctgtttgtatcagtagaattaaggtagttggacttcatctatagatgcacagttccctttgttttaatattaaatatgttctcacttaattgctttgctgctagacttgcaactaatttttttaaagtatattccattattttgcatttttgatgtgtcaaaactttgacagcttttatgtagaataaaaaaatttttaaatttgtgtattgttacatatgtttgcatcaagctagcagccaagaggttaattgtgcaactat

SEQ ID NO: 67 - DNA, 347 bp, Artificial Sequence
  Description of Artificial sequences:primer
  misc_feature (1)..(347): 3' terminal sequence from clone image:120783. adducin 1 (alpha)(ADD1) gene.
  misc_feature (158)..(158): n is a, c, g, or t
  misc_feature (165)..(165): n is a, c, g, or t
  misc_feature (175)..(175): n is a, c, g, or t
  misc_feature (205)..(205): n is a, c, g, or t
  misc_feature (237)..(237): n is a, c, g, or t
  misc_feature (239)..(239): n is a, c, g, or t
  misc_feature (241)..(241): n is a, c, g, or t
  misc_feature (261)..(261): n is a, c, g, or t
  misc_feature (272)..(272): n is a, c, g, or t
taacgcccacttcctttaacaagtgaaacaagtaaaaaataaacaaatgaaagaaaaggggagacaggaagaaggggggaaagaagacaaggagggcaggaaagaagaggagagacgcactcccatgctcagagccccatggccacacagggtccctncccaggngacgcggccnctcaggagcacggaggcttctcaccaactncgtcagggaaacacccgggccccctggggaangntnaaactttttttctttaaatnaatcttataangtaaaaacactgttacaaggggaaaaggaagccccactttatgtatttggttgcccatggttttaggagcatctt

SEQ ID NO: 68 - DNA, 4068 bp, Artificial Sequence
  Description of Artificial sequences:primer
  misc_feature (1)..(4068): adducin 1 (alpha)(ADD1) gene.
gcacccaggtcgggcggtgggggcgagcggaggggctgaggggcggagaggcctggcgggccgctgctgcgggccaggggacgggggcggagccggagccggagccgacgggcggtggccgcactgggaccccggaatcccgcgcgctgcccacgattcgcttctgaggaacctagaaagattgtacaatgaatggtgattctcgtgctgcggtggtgacctcaccacccccgaccacagcccctcacaaggagaggtacttcgaccgagtagatgagaacaacccagagtacttgagggagaggaacatggcaccagaccttcgccaggacttcaacatgatggagcaaaagaagagggtgtccatgattctgcaaagccctgctttctgtgaagaattggaatcaatgatacaggagcaatttaagaaggggaagaaccccacaggcctattggcattacagcagattgcagattttatgaccacgaatgtaccaaatgtctacccagcagctccgcaaggagggatggctgccttaaacatgagtcttggtatggtgactcctgtgaacgatcttagaggatctgattctattgcgtatgacaaaggagagaagttattacggtgtaaattggcagcgttttatagactagcagatctctttgggtggtctcagcttatctacaatcatatcacaaccagagtgaactccgagcaggaacacttcctcattgtcccttttgggcttctttacagtgaagtgactgcatccagtttggttaagatcaatctacaaggagatatagtagatcgtggaagcactaatctgggagtgaatcaggccggcttcaccttacactctgcaatttatgctgcacgcccggacgtgaagtgcgtcgtgcacattcacaccccagcaggggctgcggtctctgcaatgaaatgtggcctcttgccaatctccccggaggcgctttcccttggagaagtggcttatcatgactaccatggcattctggttgatgaagaggaaaaagttttgattcagaaaaatctggggcctaaaagcaaggttcttattctccggaaccatgggctcgtgtcagttggagagagcgttgaggaggccttctattacatccataaccttgtggttgcctgtgagatccaggttcgaactctggccagtgcaggaggaccagacaacttagtcctgctgaatcctgagaagtacaaagccaagtcccgttccccagggtctccggtaggggaaggcactggatcgcctcccaagtggcagattggtgagcaggaatttgaagccctcatgcggatgctcgataatctgggctacagaactggctacccttatcgataccctgctctgagagagaagtctaaaaaatacagcgatgtggaggttcctgctagtgtcacaggttactcctttgctagtgacggtgattcgggcacttgctccccactcagacacagttttcagaagcagcagcgggagaagacaagatggctgaactctggccggggcgacgaagcttccgaggaagggcagaatggaagcagtcccaagtcgaagactaaggtgtggacgaacattacacacgatcacgtgaaacccttgctgcagtctctctcgtccggtgtctgcgtgccaagctgtattaccaactgcttgtggactaaagaggatggacatagaacttccacctctgctgtccctaacctgtttgttccattgaacactaacccaaaagaggtccaggagatgaggaacaagatccgagagcagaatttacaggacattaagacggctggccctcagtcccaggttttgtgtggtgtagtgatggacaggagcctcgtccagggagagctggtgacggcctccaaggccatcattgaaaaggagtaccagccccacgtcattgtgagcaccacgggccccaaccccttcaccacactcacagaccgtgagctggaggagtaccgcagggaggtggagaggaagcagaagggctctgaagagaatctggacgaggctagagaacagaaagaaaagagtcctccagaccagcctgcggtcccccacccgcctcccagcactcccatcaagctggaggaaggagacggatgcgctagagagtacctgttaccctaaccttgtgccggagccgactactggagatgacagtgatgctgccacctttaagccaactctccccgatctgtcccctgatgaaccttcagaagcactcggcttcccaatgttagagaaggaggaggaagcccatagacccccaagccccactgaggcccctactgaggccagccccgagccagccccagacccagccccggtggctgaagaggctgccccctcagctgtcgaggagggggccgccgcggaccctggcagcgatgggtctccaggcaagtccccgtccaaaaagaagaagaagttccgtaccccgtcctttctgaagaagagcaagaagaagagtgactcctgaaagccctgcgctaacactgtcctgtccggagcgaccctggctctgccagcgtccccggccacgtctgtgctctgtccttgtgtaatggaatgcaaaaaagccaagccctccgcctagaggtcccctcacgtgaccagccccgtgtagccccgggctgacccagtgtgtgctcagcagccccaccccaccctgccccttgtcctctcagagcctcagcttctgggggagacatgctctccccacaggggggaggcactaagtcatggtcctggctggaaggtactgaaggcttctgcagctttggctgcacgtcaccctcctgagcctcacctttcctgccgtccctcctgttgtgaaatcaccacattctgtctctgcttggcttcccctccaccctaaagtctcaggtgacggactcagactcctggcttcatgtggcattctctctgctcagtgatctcacttaaatctatatacaaagccttggtcccgtgaaaacactcgtgtgcccaccagcggccttgaagaggcaggtctgggccagatgctgggcaggaaaccccagcggcagatgggcctgtgtgcacccaacgtgatgctatgcatgtctgaccgacgatccctcgaccagaatcagattcaggagctcagtttctttttcacttgggtctctggattcctgtcatagggaaggtatatcaggaggggaagaggcctttctagaattttctttgagcaggtttacaatttagcttacatttttcgactgtgaacgtgaataggctgctttttgctttcttctttccagaccccacagtagagcacttttcacttatttgggggaggcttcaggggactgttctcaccttaactcagccagaaagatgccctagttgtgatcaaaggtaactcgaggtggagggtagccctggggcccctcgacatcaccgtcattgatggagcctgaaccgtgtgctcctcggcagatgctgttgttgttacttccctccaagaggctggaaaagggctcagagctgctgagcaggaaccggagggtgacccatttcaggaggtgccggtaccagcctgactaggtacaggcaagcttgtgtgggcccaacaggcccttggtagagctggtgccagatgtgggctcagatcctgggcatgatgggccgagccacctcggatcccactgattggccagccgagcgagaaccaggctgctgcatggcactgaccgccgcttccagcttcctctgagccgcagggcctgctacgcgggcaagcgtgctgcctctcttctgtgtcgttttgttgccaaggcagaatgaaaagtccttaaccgtggactcttcctttatcccctcctttaccccacatatgcaatgacttttaattttcacttttgtagtttaatcctttgtattacaacatgaaatatagttgcatatatggacaccgacttgggaggacaggtcctgaatgtcctttctccagtgtaacatgttttactcacaaataaaattctttcagcaa

SEQ ID NO: 69 - DNA, 450 bp, Artificial Sequence
  Description of Artificial sequences:primer
  misc_feature (1)..(450): 3' terminal sequence from clone image:121076. atp synthase, h+ transporting, mitochondrial f0 complex, subunit g(ATP5L) gene.
  misc_feature (131)..(131): n is a, c, g, or t
  misc_feature (279)..(279): n is a, c, g, or t
  misc_feature (327)..(327): n is a, c, g, or t
  misc_feature (343)..(343): n is a, c, g, or t
  misc_feature (375)..(375): n is a, c, g, or t
  misc_feature (383)..(383): n is a, c, g, or t
ttttttgacaaatcttattttattcagatagcagtctgatcacacatggtccaacaacactcaaataataaatcaaatataatcagatgttaaagattggtcttcaaacatcatagccaatgatgccccgnttgcctataatctctccgacataaaaccacatcaacacctcagtggccaccaaaccattcagcacagcttccttaactgtgagctgtttgaagctaccagtctgagcactattgactatttttttcaggctctgaatagctctagggntctcagcaggggtgggaggaccagctcaaccttggcgtagtaccaaantgtggccaatcgaggnttcgaggtaaggtcacagcagctgagcaaatntcttgcantgggtgggatctatccacagtgactctgggagatgggcaggcaccacagggtcacacatcaggtgtt

SEQ ID NO: 70 - DNA, 1154 bp, Artificial Sequence
  Description of Artificial sequences:primer
  misc_feature (1)..(1154): atp synthase, h+ transporting, mitochondrial f0 complex, subunit g(ATP5L) gene.
gggggccttccggcgggtgacattcagccggcggttcggggcgacggactctccattccagaaccatggcccaatttgtccgtaaccttgtggagaagaccccggcgctggtgaacgctgctgtgacttactcgaagcctcgattggccacattttggtactacgccaaggttgagctggttcctcccacccctgctgagatccctagagctattcagagcctgaaaaaaatagccaatagtgctcagactggtagcttcaaacagctcacagttaaggaagctgtgctgaatggtttggtggccactgaggtgttgatgtggttttatgtcggagagattataggcaagcggggcatcattggctatgatgtttgaagaccaatctttaacatctgattatatttgatttattatttgagtgttgttggaccatgtgtgatcagactgctatctgaataaaataagatttgtcaaaactcagtgttttctccatcagatactccatgaaaggtcacaatttctcttgatattaagctgggttgtctttaaacaaccctaaatacacgtctgtttagcccgcaattggaaaggatatatgtggcaatattaacctggtacatgaatatatggggataacattttaatttgaaggtttggaatatatatatttaagctttatttccagaacagtgagggttaggtcttgggaaaactataacttgccaaagtagaagaaatagtagtaccatatgccaaagtgatagagatgaatcatgtcagtagttagaataacatttcaactgttttctttgctaaaatcacagaaagaccctattgacaacatctatgtctgtaaaaatgttagagtacttgtcatcttgaatatagcctccccaagagagaacagggtggtattctaagtatgtttctttgtaacatctttagcagtaggacagagccatacatgtgaaatctgatttttatgtgtgttattcgtttgtctggttttactacctttgcaaaaacaaaataccccaaagatatttaaacaaggttataatttagcatcttccctggatctaaatagtatattatatcctgaaataaatgaaatgattgctcaaaaaaaaaaaaaaaaaaaaaaaaaaaaaa

SEQ ID NO: 71 - DNA, 387 bp, Artificial Sequence
  Description of Artificial sequences:primer
  misc_feature (1)..(387): 3' terminal sequence from clone image:121265. interferon (alpha, beta and omega) receptor 1(IFNAR1) gene.
  misc_feature (291)..(292): n is a, c, g, or t
  misc_feature (309)..(309): n is a, c, g, or t
  misc_feature (312)..(312): n is a, c, g, or t
  misc_feature (323)..(323): n is a, c, g, or t
  misc_feature (331)..(331): n is a, c, g, or t
  misc_feature (346)..(346): n is a, c, g, or t
  misc_feature (364)..(364): n is a, c, g, or t
  misc_feature (381)..(381): n is a, c, g, or t
tttaaaatttttattgagacagggtcccctaatgttgcccaggctggtctcaaacccttaggctcaagtgatcctctcgccttggctcctgaagtgctgggattacaggccactgcatccagcccacataaagtttaaaaatttcccccaaattttacattcaagctttatttacccaaatcataattataactctaagttacaaaattatactatacagtctttttacctcagcatttgaagtgttttcccaaaaaataatttcataaatcagtgggataatcctggggnncacagggcgtgtttccnggnctgttttgggngcacccgntataggatatggggntggaatcactaagggggntcctaatggttaaaggnctggga

SEQ ID NO: 72 - DNA, 269 bp, Artificial Sequence
  Description of Artificial sequences:primer
  misc_feature (1)..(269): 5' terminal sequence from clone image:121265. interferon (alpha, beta and omega) receptor 1(IFNAR1) gene.
  misc_feature (254)..(254): n is a, c, g, or t
gactacttattgtctaaaagttaaagcagcactacttacgtcatggaaaattggtgtctatagtccagtacattgtataaagaccacagttgaaaatgaactacctccaccagaaaatatagaagtcagtgtccaaaatcagaactatgttcttaaatgggattatacatatgcaaacatgacctttccaagttcagtgggctccacgcctttttaaaaagggatccggggaaaccatttgttattaatggganacaattacctggact

SEQ ID NO: 73 - DNA, 2755 bp, Artificial Sequence
  Description of Artificial sequences:primer
  misc_feature (1)..(2755): interferon (alpha, beta and omega) receptor 1(IFNAR1) gene.
ttaggacggggcgatggcggctgagaggagctgcgcgtgcgcgaacatgtaactggtgggatctgcggcggctcccagatgatggtcgtcctcctgggcgcgacgaccctagtgctcgtcgccgtgggcccatgggtgttgtccgcagccgcaggtggaaaaaatctaaaatctcctcaaaaagtagaggtcgacatcatagatgacaactttatcctgaggtggaacaggagcgatgagtctgtcgggaatgtgactttttcattcgattatcaaaaaactgggatggataattggataaaattgtctgggtgtcagaatattactagtaccaaatgcaacttttcttcactcaagctgaatgtttatgaagaaattaaattgcgtataagagcagaaaaagaaaacacttcttcatggtatgaggttgactcatttacaccatttcgcaaagctcagattggtcctccagaagtacatttagaagctgaagataaggcaatagtgatacacatctctcctggaacaaaagatagtgttatgtgggctttggatggtttaagctttacatatagcttacttatctggaaaaactcttcaggtgtagaagaaaggattgaaaatatttattccagacataaaatttataaactctcaccagagactacttattgtctaaaagttaaagcagcactacttacgtcatggaaaattggtgtctatagtccagtacattgtataaagaccacagttgaaaatgaactacctccaccagaaaatatagaagtcagtgtccaaaatcagaactatgttcttaaatgggattatacatatgcaaacatgacctttcaagttcagtggctccacgcctttttaaaaaggaatcctggaaaccatttgtataaatggaaacaaatacctgactgtgaaaatgtcaaaactacccagtgtgtctttcctcaaaacgttttccaaaaaggaatttaccttctccgcgtacaagcatctgatggaaataacacatctttttggtctgaagagataaagtttgatactgaaatacaagctttcctacttcctccagtctttaacattagatcccttagtgattcattccatatctatatcggtgctccaaaacagtctggaaacacgcctgtgatccaggattatccactgatttatgaaattattttttgggaaaacacttcaaatgctgagagaaaaattatcgagaaaaaaactgatgttacagttcctaatttgaaaccactgactgtatattgtgtgaaagccagagcacacaccatggatgaaaagctgaataaaagcagtgtttttagtgacgctgtatgtgagaaaacaaaaccaggaaatacctctaaaatttggcttatagttggaatttgtattgcattatttgctctcccgtttgtcatttatgctgcgaaagtcttcttgagatgcatcaattatgtcttctttccatcacttaaaccttcttccagtatagatgagtatttctctgaacagccattgaagaatcttctgctttcaacttctgaggaacaaatcgaaaaatgtttcataattgaaaatataagcacaattgctacagtagaagaaactaatcaaactgatgaagatcataaaaaatacagttcccaaactagccaagattcaggaaattattctaatgaagatgaaagcgaaagtaaaacaagtgaagaactacagcaggactttgtatgaccagaaatgaactgtgtcaagtataaggtttttcagcaggagttacactgggagcctgaggtcctcaccttcctctcagtaactacagagaggacgtttcctgtttagggaaagaaaaaacatcttcagatcataggtcctaaaaatacgggcaagctcttaactatttaaaaatgaaattacaggcccgggcacggtggctcacacctgtaatcccagcactttgggaggctgaggcaggcagatcatgaggtcaagagatcgagaccagcctggccaacgtggtgaaaccccatctctactaaaaatacaaaaattagccgggtagtaggtaggcgcgcgcctgttgtcttagctactcaggaggctgaggcaggagaatcgcttgaaaacaggaggtggaggttgcagtgagccgagatcacgccactgcactccagcctggtgacagcgtgagactctttaaaaaaagaaattaaaagagttgagacaaacgtttcctacattcttttccatgtgtaaaatcatgaaaaagcctgtcaccggacttgcattggatgagatgagtcagaccaaaacagtggccacccgtcttcctcctgtgagcctaagtgcagccgtgctagctgcgcaccgtggctaaggatgacgtctgtgttcctgtccatcactgatgctgctggctactgcatgtgccacacctgtctgttcgccattcctaacattctgtttcattcttcctcgggagatatttcaaacatttggtcttttcttttaacactgagggtaggcccttaggaaatttatttaggaaagtctgaacacgttatcacttggttttctggaaagtagcttaccctagaaaacagctgcaaatgccagaaagatgatccctaaaaatgttgagggacttctgttcattcatcccgagaacattggcttccacatcacagtatctacccttacatggtttaggattaaagccaggcaatcttttactatg

SEQ ID NO: 74 - DNA, 269 bp, Artificial Sequence
  Description of Artificial sequences:primer
  misc_feature (1)..(269): 3' terminal sequence from clone image:121366. elav (embryonic lethal, abnormal vision, drosophila)-like 1 (hu antigen r)(ELAVL1) gene.
  misc_feature (1)..(1): n is a, c, g, or t
  misc_feature (5)..(5): n is a, c, g, or t
  misc_feature (56)..(56): n is a, c, g, or t
  misc_feature (104)..(104): n is a, c, g, or t
  misc_feature (122)..(122): n is a, c, g, or t
  misc_feature (196)..(196): n is a, c, g, or t
  misc_feature (251)..(251): n is a, c, g, or t
  misc_feature (261)..(261): n is a, c, g, or t
ncttnacaactccttcactcttaattatctattccgtacaaaaaaaagcatgagcnggttatttgtgggacttgttggttttgaaggaaacctgtaagattttntcccccaggcggtcgttncaaggtggctatggcatcgcggcttcttcatagtttgtcatggtcacaaagccaaaccctttgcacttgttggngttgaagtcgcggatcactttcacattggtgacggcaccaaacggcccaaacatntgccagaggntcccctcg

SEQ ID NO: 75 - DNA, 1230 bp, Artificial Sequence
  Description of Artificial sequences:primer
  misc_feature (1)..(1230): elav (embryonic lethal, abnormal vision, drosophila)-like 1 (hu antigen r)(ELAVL1) gene.
ccgccgccaccgctaccgaggccgagcggagccgttagcgccgcgccgccgccgcctcccgcccgccccggagcagccccgggcccgcccgcccgcatccagatttttgaaaaatacaatgtctaatggttatgaagaccacatggccgaagactgcaggggtgacatcgggagaacgaatttgatcgtcaactacctccctcagaacatgacccaggatgagttacgaagcctgttcagcagcattggtgaagttgaatctgcaaaacttattcgggataaagtagcaggacacagcttgggctacggctttgtgaactacgtgaccgcgaaggatgcagagagagcgatcaacacgctgaacggcttgaggctccagtcaaaaaccattaaggtgtcgtatgctcgcccgagctcagaggtgatcaaagacgccaacttgtacatcagcgggctcccgcggaccatgacccagaaggacgtagaagacatgttctctcggtttgggcggatcatcaactcgcgggtcctcgtggatcagactacaggtttgtccagaggggttgcgtttatccggtttgacaaacggtcggaggcagaagaggcaattaccagtttcaatggtcataaacccccaggttcctctgagcccatcgcagtgaagtttgcagccaaccccaaccagaacaaaaacgtggcactcctctcgcagctgtaccactcgccagcgcgacggttcggaggccccgttcaccaccaggcgcagagattcaggttctcccccatgggcgtcgatcacatgagcgggctctctggcgtcaacgtgccaggaaacgcctcctccggctggtgcattttcatctacaacctggggcaggatgccgacgaggggatcctctggcagatgtttgggccgtttggtgccgtcaccaatgtgaaagtgatccgcgacttcaacaccaacaagtgcaaagggtttggctttgtgaccatgacaaactatgaagaagccgcgatggccatagccagcctgaacggctaccgcctgggggacaaaatcttacaggtttccttcaaaaccaacaagtcccacaaataactcgctcatgctttttttgtacggaatagataattaagagtgaaggagttgaaacttttcttgttagtgtacaactcattttgcgccaattttcacaagtgtttgtctttgtctgaatgagaagtgagaag

SEQ ID NO: 76 - DNA, 317 bp, Artificial Sequence
  Description of Artificial sequences:primer
  misc_feature (1)..(317): 3' terminal sequence from clone image:122004. loc143724.
  misc_feature (3)..(3): n is a, c, g, or t
  misc_feature (40)..(40): n is a, c, g, or t
  misc_feature (138)..(138): n is a, c, g, or t
  misc_feature (261)..(261): n is a, c, g, or t
  misc_feature (271)..(271): n is a, c, g, or t
  misc_feature (289)..(289): n is a, c, g, or t
  misc_feature (306)..(306): n is a, c, g, or t
aanaaagttgttgtttatttccacctgccagctccttcanggggcgaggggtcggaggctggagacccgggaggaaagcaagtcaagacaaatgcttgacccacggggactccaggcctggcctgcagccactctggnggacttggctttgggtctggggtcttagtgtcttaggcttgagggagaggggcagtgaagaggtgactgaagggaaaattctgggggaggtctggaccatgggaggagattcaggggtgactngggtcacttncggctgggcactcccctnagttcccatattttcanattcatagggg

SEQ ID NO: 77 - DNA, 345 bp, Artificial Sequence
  Description of Artificial sequences:primer
  misc_feature (1)..(345): 3' terminal sequence from clone image:122743. desmoglein 1(DSG1) gene.
  misc_feature (299)..(299): n is a, c, g, or t
  misc_feature (312)..(312): n is a, c, g, or t
ttgaatttttatttatgttatctgtgaaaccaacagggcatctggcacacattttagatttttcccatagacatgaacatatattgcatatttagttctttttgaattttgctcgagctatatggaaaagcaaaacagagcaaggagaatgatgccaattgccatcgtaaggccagttacatgctggagatggactacaggccactcaggcacaaagaagactctgcctcaagttttagttccttagtcctaatataagagaaaagtttatgaatgctaaggagagctctcccctagcngtgggtgtttccntttatttttccccattgtgatttctcaccttgc

SEQ ID NO: 78 - DNA, 264 bp, Artificial Sequence
  Description of Artificial sequences:primer
  misc_feature (1)..(264): 5' terminal sequence from clone image:122743. desmoglein 1(DSG1) gene.
  misc_feature (258)..(258): n is a, c, g, or t
tccatcatcctagagagtcttcaaatgtggtagtgacagaaagagtaatccaaccaacttccggcatgataggtagtctgagcatgcaccccgagttagccaatgcccacaatgtcattgtgacagagagggttgtttctggtgctggcgtaactggaattagtggcaccactgggatcagcagtggcataggcagcagtggcctgggttggcaccagcatgggtctggggagtggtgccctgagtggagctggcatnaagtgg

SEQ ID NO: 79 - DNA, 4512 bp, Artificial Sequence
  Description of Artificial sequences:primer
  misc_feature (1)..(4512): desmoglein 1(DSG1) gene.
cccagcccaagtttttagggtggggatccagactggttatacgtaccttcagtccttctcccagaggaaggcagaaacacctcaaagcctgcatgtaagaacatctactgagaaattattttaatcagacaccagctgagtgggagaaaggaaaagaacagagaagaacaaacaaaactcccttggtcttggatgtaagagaatccagcagagatggactggagtttcttcagagtagttgcagtgctgttcatttttctggtggtggtagaagttaacagtgaattccgaatccaggtaagagattataacactaaaaatggcaccatcaaatggcattcaatccgaaggcagaaacgtgaatggatcaagttcgcagcagcctgtcgtgaaggtgaagacaactcaaagaggaacccaatcgccaaaattcactcagattgtgctgcaaaccagcaagttacataccgcatctctggagtaggaattgatcagccaccatatgggatctttgtcattaatcagaaaactggtgaaattaatataacatccatagttgatcgagaggtcactcctttcttcattatctactgccgagctctgaactcaatgggccaagatttagagaggcctctagagctcagagtcagggttttggatataaatgacaaccctccagtgttttcaatggctacatttgcaggacaaatagaagaaaattctaatgcaaatacactggtgatgatactcaatgctactgacgcagatgaaccgaacaatttgaactcaaaaatagccttcaagattataagacaagaaccttcagattcaccaatgtttattatcaacagaaatactggagaaattcgaacgatgaataattttctagacagagagcaatacggccagtatgctcttgctgtaagaggctctgaccgagatggtggggcagatggcatgtcagcggaatgtgagtgcaacattaaaatcctcgatgtcaatgataatatcccttacatggaacagtcttcatataccatagaaattcaagaaaatactctaaattcaaatttgctcgagattagagtaattgatttggatgaagagttctcagctaactggatggcagtaattttctttatctctggaaatgaaggaaattggtttgagatagaaatgaatgaaagaacaaatgtgggaattttaaaggttgttaagcccttagattatgaagctatgcagagtctgcaactcagtattggtgtcagaaataaagctgaatttcatcattcaattatgtctcaatataaactgaaagcatctgcaatttctgtgactgtgttaaatgtaattgaaggcccagtgtttcgtccaggttcaaagacatatgttgtaactggtaatatgggatcaaatgataaagtgggagactttgtagctactgacctggacacaggtagaccttcaacgactgttaggtatgtaatgggaaataatccagctgacctgctagctgttgattcaagaacaggcaaactcactttgaaaaataaagttaccaaggaacagtacaatatgctcggaggaaaataccaaggaacgattctctctatagatgataatcttcaaagaacttgcactggtacaattaatattaacattcaaagttttggtaatgacgacaggactaatacagagccgaacactaaaattactaccaatactggcagacaagaaagtacttcttccactaactatgataccagcacaacttctactgactctagccaagtatattcttctgaacccggaaacggagccaaagatttgttatcagacaatgtacattttggtcctgctggcattggactcctcatcatgggattcttggtcttaggattggtcccatttttgatgatctgttgtgattgtggaggtgctcctcgtagtgcagctggctttgagcctgttcccgaatgttcagatggagcaattcattcatgggcagtagaaggaccacagcctgaacccagggatataaccactgtcataccacaaataccacctgataacgcaaatataattgaatgcattgacaactcaggagtttatacaaatgagtatggtggcagagaaatgcaagatctgggaggaggagagagaatgacaggatttgaactaacagagggagttaaaacttcaggaatgcctgagatatgtcaagaatactctggaacattaagaagaaattctatgagggaatgtagagaaggaggtctgaatatgaatttcatggaaagctacttctgtcagaaagcatatgcttacgcagatgaagatgaaggacgcccatctaatgactgtttgctcatatatgacatcgaaggtgtaggttcccctgctggctctgtgggttgttgtagcttcattggagaagacctggatgacagcttcttggataccctgggacctaaatttaagaagttggcagacatcagcctaggaaaagaatcatatccagaccttgatccttcttggccaccacaaagcactgaaccagtttgccttcctcaggaaacagagcccgttgttagtggacacccaccaatctccccacatttcggcactaccacagtaatttctgagagcacctatccctcgggacctggtgtactgcatcctaagcctattctcgatcctctgggctatggtaatgtcactgtgaccgagtcttacaccacctctgacactctgaagccctctgtgcacgttcacgataaccgaccagcatcaaacgtggtagtgacagagagagtggtcggcccaatctctggcgctgatttgcatggaatgttagagatgcctgacttgcgagatgggtcgaatgttatagtgacagaaagggtaatagcaccaagctctagtctacccacctctctgactatccatcatcctagagagtcttcaaatgtggtagtgacagaaagagtaatccaaccaacttccggcatgataggtagtctgagtatgcaccccgagttagccaatgcccacaatgtcattgtgacagagagggttgtttctggtgctggcgtaactggaattagtggcaccactgggatcagcggtggcataggcagcagtggcctggttggcaccagcatgggtgctgggagcggtgccctgagtggagctggcataagtggtggtggcattggcctgagcagcttgggagggacagccagcattggccacatgaggagttcctctgaccatcactttaaccaaaccattgggtccgcctcccctagcacagctcgaagtcgaatcacaaagtatagtaccgtgcaatatagcaagtagtcaggaccccagctcactttttcatagtcattgtggtttagatccaattcccaccactaaaaaactaacaatgtgatttataacgcacaacttcgtgctcaggtcatctaggagcaaggtgagaaatcacaatgagaaaaataaatggaaacaccactgctaggggagagctctccttagcattcataaacttttctcttatattaggactaaggaactaaaacttgaggcagagtcttctttgtgcctgagtggcctgtagtccatctccagcatgtaactggccttacgatggcaattggcatcattctccttgctctgttttgcttttccatatagctcgagcaaaattcaaaaagaactaaatatgcaatatatgttcatatctatgggaaaaatctaaaatgtgtgccagatgccctgttggtttcacagataacataaataaaaattcaaccacagatttatacaagggttaaccattttttttaagtttgactacatagtcaagtccacaagccatcaagcactcctaccttaattattgcactagagaaaataaattccaaattaggaagtgtttcctaggaggaaaattccattagagagtggcaataggatgaggtttcttcagggtaaactagcaatgcctgagcctgaaccttaatgtggggcctcagttaatatccctgtggagtcaaggattcttctgattctagtgtgtgtttagtgatagatgtagtcttgacgaatattgcttactggtgaggttgaggaatatcacactcgtctttccctttaccactgtggttttgacttaagaaagcaaaactcactaagtttacttctcgaattgaagcaagtgaggcctgacatggttgtcatcactagtggcaaatgaccttccaagtaagcagatgggaactgaattgtgttttcaggttttgtttttagtaggtgatattcattcgtatccagctctttattacatagctctgaagttaaaatgatttacataggccgagctgtggacaaaaaaaaagaagcagcagcttgtagtatgcttaagctttggggaatttttttttaaggggatctaaaaaaatgtttttagaacatgtaaaatgtttaatggtgaaagttggaaaa

SEQ ID NO: 80 - DNA, 373 bp, Artificial Sequence
  Description of Artificial sequences:primer
  misc_feature (1)..(373): 3' terminal sequence from clone image:122756. olfactomedin 1(OLFM1) gene.
  misc_feature (18)..(18): n is a, c, g, or t
  misc_feature (49)..(50): n is a, c, g, or t
  misc_feature (71)..(71): n is a, c, g, or t
  misc_feature (98)..(98): n is a, c, g, or t
  misc_feature (279)..(279): n is a, c, g, or t
  misc_feature (307)..(307): n is a, c, g, or t
  misc_feature (325)..(325): n is a, c, g, or t
  misc_feature (335)..(335): n is a, c, g, or t
tgcccctggtggagctgngcagacacccatgtatacccacagcatcgcnncctgatgaaggaggcaaaggnttgatcttctatgacacgaaggtaccntgatgaatcgagtgctgaatgccactgtgcagaggacagcggcccagagagacttgcagtacgtggagaagatggagaaccaaatgaaaggactggagtcaagttcaaacaggtggaggagagtcataagcaacacctggccaggcagtttaagggctaacttaaaagagttttttcaatnctgcagtgactgaagaagcagtccactnccatgttaccatgaaagngagccagagngcttttttcaccatgcatttttcctattattttccaat

SEQ ID NO: 81 - DNA, 2741 bp, Artificial Sequence
  Description of Artificial sequences:primer
  misc_feature (1)..(2741): olfactomedin 1(OLFM1) gene.
gcgcgggggagccattaggaggcgaggagagaggagggcgcagctcccgcccagcccagccctgcccagccctgcccggaggcagacgcgccggaaccgggacgcgataaatatgcagagcggaggcttcgcgcagcagagcccgcgcgccgcccgctccgggtgctgaatccaggcgtggggacacgagccaggcgccgccgccggagccagcggagccggggccagagccggagcgcgtccgcgtccacgcagccgccggccggccagcacccagggccctgcatgccaggtcgttggaggtggcagcgagacatgcacccggcccggaagctcctcagcctcctcttcctcatcctgatgggcactgaactcactcaagtgctgcccaccaaccctgaggagagctggcaggtgtacagctctgcccaggacagcgagggcaggtgtatctgcacagtggtcgccccacagcagaccatgtgttcacgggatgcccgcacaaaacagctgaggcagctactggagaaggtgcagaacatgtctcaatccatagaggtcttggacaggcggacccagagagacttgcagtacgtggagaagatggagaaccaaatgaaaggactggagtccaagttcaaacaggtggaggagagtcataagcaacacctggccaggcagtttaaggcgataaaagcgaaaatggatgaacttaggcctttgatacctgtgttggaagagtacaaggccgatgccaaattggtattgcagtttaaagaggaggtccagaatctgacgtcagtgcttaacgagctgcaagaggaaattggcgcctatgactacgatgaacttcagagcagagtgtccaatcttgaagaaaggctccgtgcatgcatgcaaaaactagcttgcgggaagttgacgggcatcagtgaccccgtgactgtcaagacctccggctcgaggttcggatcctggatgacagaccctctcgcccctgaaggcgataaccgggtgtggtacatggacggctatcacaacaaccgcttcgtacgtgagtacaagtccatggttgacttcatgaacacggacaatttcacctcccaccgtctcccccacccctggtcgggcacggggcaggtggtctacaacggttctatctacttcaacaagttccagagccacatcatcatcaggtttgacctgaagacagagaccatcctcaagacccgcagcctggactatgccggttacaacaacatgtaccactacgcctggggtggccactcggacatcgacctcatggtggacgagagcgggctgtgggccgtgtacgccaccaaccagaacgctggcaacatcgtggtcagtaggctggaccccgtgtccctgcagaccctgcagacctggaacacgagctaccccaagcgcagcgccggggaggccttcatcatctgcggcacgctgtacgtcaccaacggctactcagggggtaccaaggtccactatgcataccagaccaatgcctccacctatgaatacatcgacatcccattccagaacaaatactcccacatctccatgctggactacaaccccaaggaccgggccctgtatgcctggaacaacggccaccagatcctctacaacgtgaccctcttccacgtcatccgctccgacgagttgtagctccctcctcctggaagccaagggcccacgtcctcaccacaaagggactcctgtgaaactgctgccaaaaagataccaataacactaacaataccgatcttgaaaaatcatcagcagtgcggattctgacatcgagggatggcattacctccgtgtttctccctttcgagccggcgggccacagacgtcggaagaaactcccgtatttgcagctggaactgcagcccacggcgccccggttttcctccccgccctgtccctctctggtcaaacaacatactaaagaggcgaggcaatgactgttggccagttctcaccggggaaaaacccactgttaggatggcatgaacatttccttagatcgtggtcagctccgaggaatgtggcgtccaggctctttgagagccatgggctgcacccggccgtaggctagtgtaactcgcatcccattgcagtgccgtttcttgactgtgttgctgtctcttagattaaccgtgctgaggctccacatagctcctggacctgtgtctagtacatactgaagcgatggtcagagtgtgtagagtgaagttgctgtgcccacattgtttgaactcgcgtaccccgtagatacattgtgcaacgttcttctgttattcccttgaggtggtaacttcgtatgttcagtttatgcgatgattgttgtaaatgcaatgccgtagtttggattaataagtggatggtttttgtttctaaaaagaaaaaaaaaatcagtgttcacccttatagagacatagtcaagttcatgttgataataatcaaaggaattactctcttcttgttaaattagctaaatcatgtaaccgcagataggaagggctcacctggggaaactctggtttccgatgggacaggaaagtcatacgggcaacagtatgcggaaagtacgtttttttaagtaaaaaacaaaggcaaactttgtactatccagttatctaaggaacaataaaaacattaggagaaaaaaaaaaaaaaaaaaaaaaaaaaaaaaaaaaaaaaaaaaaaaaaaaaaa

SEQ ID NO: 82 - DNA, 101 bp, Artificial Sequence
  Description of Artificial sequences:primer
  misc_feature (1)..(101): 3' terminal sequence from clone image:123379. complement component 3(C3) gene.
  misc_feature (51)..(52): n is a, c, g, or t
  misc_feature (61)..(61): n is a, c, g, or t
  misc_feature (67)..(68): n is a, c, g, or t
  misc_feature (88)..(88): n is a, c, g, or t
ctgccaccaaccacatgggcaacgtcaccttcacgatcccagccaacaggnngttcaagtnagaaanngggcgcaacaagttcgtgancgtgcaggccacc

SEQ ID NO: 83 - DNA, 5067 bp, Artificial Sequence
  Description of Artificial sequences:primer
  misc_feature (1)..(5067): complement component 3(C3) gene.
ctcctccccatcctctccctctgtccctctgtccctctgaccctgcactgtcccagcaccatgggacccacctcaggtcccagcctgctgctcctgctactaacccacctccccctggctctggggagtcccatgtactctatcatcacccccaacatcttgcggctggagagcgaggagaccatggtgctggaggcccacgacgcgcaaggggatgttccagtcactgttactgtccacgacttcccaggcaaaaaactagtgctgtccagtgagaagactgtgctgacccctgccaccaaccacatgggcaacgtcaccttcacgatcccagccaacagggagttcaagtcagaaaaggggcgcaacaagttcgtgaccgtgcaggccaccttcgggacccaagtggtggagaaggtggtgctggtcagcctgcagagcgggtacctcttcatccagacagacaagaccatctacacccctggctccacagttctctatcggatcttcaccgtcaaccacaagctgctacccgtgggccggacggtcatggtcaacattgagaacccggaaggcatcccggtcaagcaggactccttgtcttctcagaaccagcttggcgtcttgcccttgtcttgggacattccggaactcgtcaacatgggccagtggaagatccgagcctactatgaaaactcaccacagcaggtcttctccactgagtttgaggtgaaggagtacgtgctgcccagtttcgaggtcatagtggagcctacagagaaattctactacatctataacgagaagggcctggaggtcaccatcaccgccaggttcctctacgggaagaaagtggagggaactgcctttgtcatcttcgggatccaggatggcgaacagaggatttccctgcctgaatccctcaagcgcattccgattgaggatggctcgggggaggttgtgctgagccggaaggtactgctggacggggtgcagaacctccgagcagaagacctggtggggaagtctttgtacgtgtctgccaccgtcatcttgcactcaggcagtgacatggtgcaggcagagcgcagcgggatccccatcgtgacctctccctaccagatccacttcaccaagacacccaagtacttcaaaccaggaatgccctttgacctcatggtgttcgtgacgaaccctgatggctctccagcctaccgagtccccgtggcagtccagggcgaggacactgtgcagtctctaacccagggagatggcgtggccaaactcagcatcaacacacaccccagccagaagcccttgagcatcacggtgcgcacgaagaagcaggagctctcggaggcagagcaggctaccaggaccatgcaggctctgccctacagcaccgtgggcaactccaacaattacctgcatctctcagtgctacgtacagagctcagacccggggagaccctcaacgtcaacttcctcctgcgaatggaccgcgcccacgaggccaagatccgctactacacctacctgatcatgaacaagggcaggctgttgaaggcgggacgccaggtgcgagagcccggccaggacctggtggtgctgcccctgtccatcaccaccgacttcatcccttccttccgcctggtggcgtactacacgctgatcggtgccagcggccagagggaggtggtggccgactccgtgtgggtggacgtcaaggactcctgcgtgggctcgctggtggtaaaaagcggccagtcagaagaccggcagcctgtacctgggcagcagatgaccctgaagatagagggtgaccacggggcccgggtggtactggtggccgtggacaagggcgtgttcgtgctgaataagaagaacaaactgacgcagagtaagatctgggacgtggtggagaaggcagacatcggctgcaccccgggcagtgggaaggattacgccggtgtcttctccgacgcagggctgaccttcacgagcagcagtggccagcagaccgcccagagggcagaacttcagtgcccgcagccagccgcccgccgacgccgttccgtgcagctcacggagaagcgaatggacaaagtcggcaagtaccccaaggagctgcgcaagtgctgcgaggacggcatgcgggagaaccccatgaggttctcgtgccagcgccggacccgtttcatctccctgggcgaggcgtgcaagaaggtcttcctggactgctgcaactacatcacagagctgcggcggcagcacgcgcgggccagccacctgggcctggccaggagtaacctggatgaggacatcattgcagaagagaacatcgtttcccgaagtgagttcccagagagctggctgtggaacgttgaggacttgaaagagccaccgaaaaatggaatctctacgaagctcatgaatatatttttgaaagactccatcaccacgtgggagattctggctgtcagcatgtcggacaagaaagggatctgtgtggcagaccccttcgaggtcacagtaatgcaggacttcttcatcgacctgcggctaccctactctgttgttcgaaacgagcaggtggaaatccgagccgttctctacaattaccggcagaaccaagagctcaaggtgagggtggaactactccacaatccagccttctgcagcctggccaccaccaagaggcgtcaccagcagaccgtaaccatcccccccaagtcctcgttgtccgttccatatgtcatcgtgccgctaaagaccggcctgcaggaagtggaagtcaaggctgccgtctaccatcatttcatcagtgacggtgtcaggaagtccctgaaggtcgtgccggaaggaatcagaatgaacaaaactgtggctgttcgcaccctggatccagaacgcctgggccgtgaaggagtgcagaaagaggacatcccacctgcagacctcagtgaccaagtcccggacaccgagtctgagaccagaattctcctgcaagggaccccagtggcccagatgacagaggatgccgtcgacgcggaacggctgaagcacctcattgtgaccccctcgggctgcggggaacagaacatgatcggcatgacgcccacggtcatcgctgtgcattacctggatgaaacggagcagtgggagaagttcggcctagagaagcggcagggggccttggagctcatcaagaaggggtacacccagcagctggccttcagacaacccagctctgcctttgcggccttcgtgaaacgggcacccagcacctggctgaccgcctacgtggtcaaggtcttctctctggctgtcaacctcatcgccatcgactcccaagtcctctgcggggctgttaaatggctgatcctggagaagcagaagcccgacggggtcttccaggaggatgcgcccgtgatacaccaagaaatgattggtggattacggaacaacaacgagaaagacatggccctcacggcctttgttctcatctcgctgcaggaggctaaagatatttgcgaggagcaggtcaacagcctgccaggcagcatcactaaagcaggagacttccttgaagccaactacatgaacctacagagatcctacactgtggccattgctggctatgctctggcccagatgggcaggctgaaggggcctcttcttaacaaatttctgaccacagccaaagataagaaccgctgggaggaccctggtaagcagctctacaacgtggaggccacatcctatgccctcttggccctactgcagctaaaagactttgactttgtgcctcccgtcgtgcgttggctcaatgaacagagatactacggtggtggctatggctctacccaggccaccttcatggtgttccaagccttggctcaataccaaaaggacgcccctgaccaccaggaactgaaccttgatgtgtccctccaactgcccagccgcagctccaagatcacccaccgtatccactgggaatctgccagcctcctgcgatcagaagagaccaaggaaaatgagggtttcacagtcacagctgaaggaaaaggccaaggcaccttgtcggtggtgacaatgtaccatgctaaggccaaagatcaactcacctgtaataaattcgacctcaaggtcaccataaaaccagcaccggaaacagaaaagaggcctcaggatgccaagaacactatgatccttgagatctgtaccaggtaccggggagaccaggatgccactatgtctatattggacatatccatgatgactggctttgctccagacacagatgacctgaagcagctggccaatggtgttgacagatacatctccaagtatgagctggacaaagccttctccgataggaacaccctcatcatctacctggacaaggtctcacactctgaggatgactgtctagctttcaaagttcaccaatactttaatgtagagcttatccagcctggagcagtcaaggtctacgcctattacaacctggaggaaagctgtacccggttctaccatccggaaaaggaggatggaaagctgaacaagctctgccgtgatgaactgtgccgctgtgctgaggagaattgcttcatacaaaagtcggatgacaaggtcaccctggaagaacggctggacaaggcctgtgagccaggagtggactatgtgtacaagacccgactggtcaaggttcagctgtccaatgactttgacgagtacatcatggccattgagcagaccatcaagtcaggctcggatgaggtgcaggttggacagcagcgcacgttcatcagccccatcaagtgcagagaagccctgaagctggaggagaagaaacactacctcatgtggggtctctcctccgatttctggggagagaagcccaacctcagctacatcatcgggaaggacacttgggtggagcactggcctgaggaggacgaatgccaagacgaagagaaccagaaacaatgccaggacctcggcgccttcaccgagagcatggttgtctttgggtgccccaactgaccacacccccattcc

SEQ ID NO: 84 - DNA, 311 bp, Artificial Sequence
  Description of Artificial sequences:primer
  misc_feature (1)..(311): 3' terminal sequence from clone image:123664. complement component 4 binding protein, alpha(C4BPA) gene.
tttaatcgaaaaaaaatttgtgctttgtgtgttgaaaagcaaaaacatgagccacacagaggatgattaataatttcacaatctcaaagcactaaactttagcaaattatcatttctagatatttattatgatgaatatcactgccaaattgacagtagatttgctaaactgatctgtattgaattgcaagaggcaagccagcaagacaccttttcctccttcttttgaggaaaaattataggttctttatcccaaagtggggttgtcttgcgctgtctctctgtaggttcccgttgtttccaatttcccg

SEQ ID NO: 85 - DNA, 448 bp, Artificial Sequence
  Description of Artificial sequences:primer
  misc_feature (1)..(448): 5' terminal sequence from clone image:123664. complement component 4 binding protein, alpha(C4BPA) gene.
  misc_feature (77)..(77): n is a, c, g, or t
  misc_feature (320)..(320): n is a, c, g, or t
  misc_feature (354)..(354): n is a, c, g, or t
  misc_feature (359)..(359): n is a, c, g, or t
  misc_feature (364)..(364): n is a, c, g, or t
  misc_feature (394)..(394): n is a, c, g, or t
  misc_feature (417)..(417): n is a, c, g, or t
  misc_feature (448)..(448): n is a, c, g, or t
gagatggcacgtggagtccccgaacaccatcatttggagacatttgcaattttcctcctaaaattgcccatgggatntataaacaatctagttcatacagctttttcaaagaagagattatatatgaatgtgataaaggctacattctggtcggacaggcgaaactctcctggcagttattcacactggtcagctccagcccctcaatgtaaagctctgtgtcgggaaaccagaattagtggaatgggaaggttgttcttgtgggataaggatccagtatgttggaggcctggaaaatgttcaccatccaatgtggttcntgggctatgggtgtgggttgggtcccccaaagtnttcanttggntctgggggaacaggaacctggggtaccccngagggtggccccagtgttgagtngggggagaccccccgagggttgttggaacan

SEQ ID NO: 86 - DNA, 2263 bp, Artificial Sequence
  Description of Artificial sequences:primer
  misc_feature (1)..(2263): complement component 4 binding protein, alpha(C4BPA) gene.
tgaaattcagggactctttggtggagcaattaccagtcaacttcagggtattatgataaactctgatctggggaggaaccaggactacatagatcaaggcagttttcttctttgagaaactatcccagatatcatcatagagtcttctgctcttcctcaactaccaaagaaaaacatcagcgaagcagcaggccatgcaccccccaaaaactccatctggggctcttcatagaaaaaggaaaatggcagcctggcccttctccaggctgtggaaagtctctgatccaattctcttccaaatgaccttgatcgctgctctgttgcctgctgttcttggcaattgtggtcctccacccactttatcatttgctgccccgatggatattacgttgactgagacacgcttcaaaactggaactactctgaaatacacctgcctccctggctacgtcagatcccattcaactcagacgcttacctgtaattctgatggcgaatgggtgtataacaccttctgtatctacaaacgatgcagacacccaggagagttacgtaatgggcaagtagagattaagacagatttatcttttggatcacaaatagaattcagctgttcagaaggatttttcttaattggctcaaccactagtcgttgtgaagtccaagatagaggagttggctggagtcatcctctcccacaatgtgaaattgtcaagtgtaagcctcctccagacatcaggaatggaaggcacagcggtgaagaaaatttctacgcatacggcttttctgtcacctacagctgtgacccccgcttctcactcttgggccatgcctccatttcttgcactgtggagaatgaaacaataggtgtttggagaccaagccctcctacctgtgaaaaaatcacctgtcgcaagccagatgtttcacatggggaaatggtctctggatttggacccatctataattacaaagacactattgtgtttaagtgccaaaaaggttttgttctcagaggcagcagtgtaattcattgtgatgctgatagcaaatggaatccttctcctcctgcttgtgagcccaatagttgtattaatttaccagacattccacatgcttcctgggaaacatatcctaggccgacaaaagaggatgtgtatgttgttgggactgtgttaaggtaccgctgtcatcctggctacaaacccactacagatgagcctacgactgtgatttgtcagaaaaatttgagatggaccccataccaaggatgtgaggcgttatgttgccctgaaccaaagctaaataatggtgaaatcactcaacacaggaaaagtcgtcctgccaatcactgtgtttatttctatggagatgagatttcattttcatgtcatgagaccagtaggttttcagctatatgccaaggagatggcacgtggagtccccgaacaccatcatgtggagacatttgcaattttcctcctaaaattgcccatgggcattataaacaatctagttcatacagctttttcaaagaagagattatatatgaatgtgataaaggctacattctggtcggacaggcgaaactctcctgcagttattcacactggtcagctccagcccctcaatgtaaagctctgtgtcggaaaccagaattagtgaatggaaggttgtctgtggataaggatcagtatgttgagcctgaaaatgtcaccatccaatgtgattctggctatggtgtggttggtccccaaagtatcacttgctctgggaacagaacctggtacccagaggtgcccaagtgtgagtgggagacccccgaaggctgtgaacaagtgctcacaggcaaaagactcatgcagtgtctcccaaacccagaggatgtgaaaatggccctggaggtatataagctgtctctggaaattgaacaactggaactacagagagacagcgcaagacaatccactttggataaagaactataatttttctcaaaagaaggaggaaaaggtgtcttgctggcttgcctcttgcaattcaatacagatcagtttagcaaatctactgtcaatttggcagtgatattcatcataataaatatctagaaatgataatttgctaaagtttagtgctttgagattgtgaaattattaatcatcctctgtgtggctcatgtttttgcttttcaacacacaaagcacaaattttttttcgattaaaaatgtatgttaaaaaaaaaaaaaaaaaaaaaaaaaaaaaa

SEQ ID NO: 87 - DNA, 163 bp, Artificial Sequence
  Description of Artificial sequences:primer
  misc_feature (1)..(163): 3' terminal sequence from clone image:123916. dystrophia myotonica-protein kinase(DMPK) gene.
  misc_feature (79)..(79): n is a, c, g, or t
  misc_feature (83)..(83): n is a, c, g, or t
  misc_feature (135)..(135): n is a, c, g, or t
  misc_feature (142)..(142): n is a, c, g, or t
  misc_feature (158)..(158): n is a, c, g, or t
aaggctgggggaggaaagtggtggagccaagccctccctgggcaaacgagaccccaaaatagctccttggcccctggcngggnagccacattcctgcccaggctgggattagaaacagaaacatttcgggggttngagggtngcgcgggaagacacantccct

SEQ ID NO: 88 - DNA, 335 bp, Artificial Sequence
  Description of Artificial sequences:primer
  misc_feature (1)..(335): 5' terminal sequence from clone image:123916. dystrophia myotonica-protein kinase(DMPK) gene.
  misc_feature (260)..(260): n is a, c, g, or t
  misc_feature (302)..(302): n is a, c, g, or t
ttaaattatggaagcccctcaggttcctccctgtcccgcagacctcttatttatactaaagttccctgttttctcagcgggtctgtccccttcggaggagatgatgtagaggacctgtgtgtgtactctgtggttctaggcagtccgctttccccagaggaggagtgcaggcctgctcccagcccagcgcctcccaccccttttcatagcaggaaaagccggagcccagggagggaacggacctgcgagtcacacaactngtgacccacaccagcggctgggagcagggaccctcttggggnagaagagcatccttgcccgcagccagggcccct

SEQ ID NO: 89 - DNA, 3407 bp, Artificial Sequence
  Description of Artificial sequences:primer
  misc_feature (1)..(3407): dystrophia myotonica-protein kinase(DMPK) gene.
cagggagggcttggctccaccactttcctcccccagcctttgggcagcaggtcacccctgttcaggctctgagggtgccccctcctggtcctgtcctcaccaccccttccccacctcctgggaaaaaaaaaaaaaaaaaaaaaaaagctggtttaaagcagagagcctgagggctaaatttaactgtccgagtcggaatccatctctgagtcacccaagaagctgccctggcctcccgtccccttcccaggcctcaacccctttctcccacccagccccaacccccagccctcaccccctagcccccagttctggagcttgtcgggagcaagggggtggttgctactgggtcactcagcctcaattggccctgttcagcaatgggcaggttcttcttgaaattcatcacacctgtggcttcctctgtgctctacctttttattggggtgacagtgtgacagctgagattctccatgcattccccctactctagcactgaagggttctgaagggccctggaaggagggagcttggggggctggcttgtgaggggttaaggctgggaggcgggaggggggctggaccaaggggtggggagaaggggaggaggcctcggccggccgcagagagaagtggccagagaggcccaggggacagccagggacaggcagacatgcagccagggctccagggcctggacaggggctgccaggccctgtgacaggaggaccccgagcccccggcccggggaggggccatggtgctgcctgtccaacatgtcagccgaggtgcggctgaggcggctccagcagctggtgttggacccgggcttcctggggctggagcccctgctcgaccttctcctgggcgtccaccaggagctgggcgcctccgaactggcccaggacaagtacgtggccgacttcttgcagtgggcggagcccatcgtggtgaggcttaaggaggtccgactgcagagggacgacttcgagattctgaaggtgatcggacgcggggcgttcagcgaggtagcggtagtgaagatgaagcagacgggccaggtgtatgccatgaagatcatgaacaagtgggacatgctgaagaggggcgaggtgtcgtgcttccgtgaggagagggacgtgttggtgaatggggaccggcggtggatcacgcagctgcacttcgccttccaggatgagaactacctgtacctggtcatggagtattacgtgggcggggacctgctgacactgctgagcaagtttggggagcggattccggccgagatggcgcgcttctacctggcggagattgtcatggccatagactcggtgcaccggcttggctacgtgcacagggacatcaaacccgacaacatcctgctggaccgctgtggccacatccgcctggccgacttcggctcttgcctcaagctgcgggcagatggaacggtgcggtcgctggtggctgtgggcaccccagactacctgtcccccgagatcctgcaggctgtgggcggtgggcctgggacaggcagctacgggcccgagtgtgactggtgggcgctgggtgtattcgcctatgaaatgttctatgggcagacgcccttctacgcggattccacggcggagacctatggcaagatcgtccactacaaggagcacctctctctgccgctggtggacgaaggggtccctgaggaggctcgagacttcattcagcggttgctgtgtcccccggagacacggctgggccggggtggagcaggcgacttccggacacatcccttcttctttggcctcgactgggatggtctccgggacagcgtgcccccctttacaccggatttcgaaggtgccaccgacacatgcaacttcgacttggtggaggacgggctcactgccatggtgagcgggggcggggagacactgtcggacattcgggaaggtgcgccgctaggggtccacctgccttttgtgggctactcctactcctgcatggccctcagggacagtgaggtcccaggccccacacccatggaagtggaggccgagcagctgcttgagccacacgtgcaagcgcccagcctggagccctcggtgtccccacaggatgaaacagctgaagtggcagttccagcggctgtccctgcggcagaggctgaggccgaggtgacgctgcgggagctccaggaagccctggaggaggaggtgctcacccggcagagcctgagccgggagatggaggccatccgcacggacaaccagaacttcgccagtcaactacgcgaggcagaggctcggaaccgggacctagaggcacacgtccggcagttgcaggagcggatggagttgctgcaggcagagggagccacagctgtcacgggggtccccagtccccgggccacggatccaccttcccatctagatggccccccggccgtggctgtgggccagtgcccgctggtggggccaggccccatgcaccgccgccacctgctgctccctgccagggtccctaggcctggcctatcggaggcgctttccctgctcctgttcgccgttgttctgtctcgtgccgccgccctgggctgcattgggttggtggcccacgccggccaactcaccgcagtctggcgccgcccaggagccgcccgcgctccctgaaccctagaactgtcttcgactccggggccccgttggaagactgagtgcccggggcacggcacagaagccgcgcccaccgcctgccagttcacaaccgctccgagcgtgggtctccgcccagctccagtcctgtgtaccgggcccgccccctagcggccggggagggaggggccgggtccgcggccggcgaacggggctcgaagggtccttgtagccgggaatgctgctgctgctgctgctgctgctgctgctgctggggggatcacagaccatttctttctttcggccaggctgaggccctgacgtggatgggcaaactgcaggcctgggaaggcagcaagccgggccgtccgtgttccatcctccacgcacccccacctatcgttggttcgcaaagtgcaaagctttcttgtgcatgacgccctgctctggggagcgtctggcgcgatctctgcctgcttactcgggaaatttgcttttgccaaacccgctttttcggggatcccgcgcccccctcctcacttgcgctgctctcggagccccagccggctccgcccgcttcggcggtttggatatttattgacctcgtcctccgactcgctgacaggctacaggacccccaacaaccccaatccacgttttggatgcactgagaccccgacattcctcggtatttattgtctgtccccacctaggacccccacccccgaccctcgcgaataaaaggccctccatctgccc

SEQ ID NO: 90 - DNA, 260 bp, Artificial Sequence
  Description of Artificial sequences:primer
  misc_feature (1)..(260): 3' terminal sequence from clone image:123948. ribosomal protein l6(RPL6) gene.
attcctctgacaaggacagggttgcggctgcaatggggcttccccttcttgggctttttagctttgaggttaccctttttcaccttgccaccagcatcaaccttcttggcttcgggtttcttctctttagtatctggcttctcaactttttcacccgccatcttgggatttagcggctgactacttcctcttgtacatggcctttctcattcccgtcctccggcctggggctacagaatgaggactcttttaggcttgcg

SEQ ID NO: 91 - DNA, 271 bp, Artificial Sequence
  Description of Artificial sequences:primer
  misc_feature (1)..(271): 5' terminal sequence from clone image:123948. ribosomal protein l6(RPL6) gene.
ttgctgaggaagctaaacaaataaagctgctgacattcccattctcaaaaaaaagggcagtgttcatctgatcattgtatttgtatcctcagtgaatcagaaccagaaaaaggctaaatgattcccagagacacagccatgaagcaggtggtttcgatctgaaaaaatcaaggtgaaaagctctagcaaccagaaagaaacgaatgggagggaaaatgggaaaacgcaagctaggaagagtcttcattctgtaggccagggccggagacgg

SEQ ID NO: 92 - DNA, 950 bp, Artificial Sequence
  Description of Artificial sequences:primer
  misc_feature (1)..(950): ribosomal protein l6(RPL6) gene.
gggaccttaattctctttcccatcttgcaagatggcgggtgaaaaagttgagaagccagatactaaagagaagaaacccgaagccaagaaggttgatgctggtggcaaggtgaaaaagggtaacctcaaagctaaaaagcccaagaaggggaagccccattgcagccgcaaccctgtccttgtcagaggaattggcaggtattcccgatctgccatgtattccagaaaggccatgtacaagaggaagtactcagccgctaaatccaaggttgaaaagaaaaagaaggagaaggttctcgcaactgttacaaaaccagttggtggtgacaagaacggcggtacccgggtggttaaacttcgcaaaatgcctagatattatcctactgaagatgtgcctcgaaagctgttgagccacggcaaaaaacccttcagtcagcacgtgagaaaactgcgagccagcattacccccgggaccattctgatcatcctcactggacgccacaggggcaagagggtggttttcctgaagcagctggctagtggcttattacttgtgactggacctctggtcctcaatcgagttcctctacgaagaacacaccagaaatttgtcattgccacttcaaccaaaatcgatatcagcaatgtaaaaatcccaaaacatcttactgatgcttacttcaagaagaagaagctgcggaagcccagacaccaggaaggtgagatcttcgacacagaaaaagagaaatatgagattacggagcagcgcaagattgatcagaaagctgtggactcacaaattttaccaaaaatcaaagctattcctcagctccagggctacctgcgatctgtgtttgctctgacgaatggaatttatcctcacaaattggtgttctaaatgtcttaagaacctaattaaatagctgactacaaaaaaaaaaaaaaaaaaa

SEQ ID NO: 93 - DNA, 225 bp, Artificial Sequence
  Description of Artificial sequences:primer
  misc_feature (1)..(225): 3' terminal sequence from clone image:123953. major histocompatibility complex, class ii, dq beta 1(HLA-DQB1) gene.
  misc_feature (213)..(213): n is a, c, g, or t
caggatcatgtttaattatgtaaaaaagctctaaagtcaggtaatgtttttcatgtgcttctcttgagcagtctgaggaaagaatagaaacagaaaccccttgggacctgagtagacgcagctggccatgcacaggcagaggctctgggtcagtgcaggaagcagagtcacagccagcgccttggggtggggatgaaaggagatgacctgggngctgcgtgacac

SEQ ID NO: 94 - DNA, 276 bp, Artificial Sequence
  Description of Artificial sequences:primer
  misc_feature (1)..(276): 5' terminal sequence from clone image:123953. major histocompatibility complex, class ii, dq beta 1(HLA-DQB1) gene.
  misc_feature (266)..(266): n is a, c, g, or t
  misc_feature (271)..(271): n is a, c, g, or t
ttgactaccactgcttttcccttcgtctcagttatgtcttggaagaaggctttgcggatccccggagaccttcgggtagcaactgtcaccttgatgctggcgatgctgagctccctactggctgagggcagagactctcccgaggatttcgtgttccagtttaagggcatgtgctacttcaccaacgggacggagcgcgtgctcttgtgaccagatacatctataaccgagagagtacgcgcgcttcgacagcgacgtggggggtntaccncgcgg

SEQ ID NO: 95 - DNA, 1190 bp, Artificial Sequence
  Description of Artificial sequences:primer
  misc_feature (1)..(1190): major histocompatibility complex, class ii, dq beta 1(HLA-DQB1) gene.
cagatccatcaggtccgagctgtgttgactaccacttttcccttcgtctcaattatgtcttggaaaaaggctttgcggatccccggaggccttcgggcagcaactgtgaccttgatgctgtcgatgctgagcaccccagtggctgagggcagagactctcccgaggatttcgtgtaccagtttaagggcatgtgctacttcaccaacgggacagagcgcgtgcgtcttgtgagcagaagcatctataaccgagaagagatcgtgcgcttcgacagcgacgtgggggagttccgggcggtgacgctgctggggctgcctgccgccgagtactggaacagccagaaggacatcctggagaggaaacgggcggcggtggacagggtgtgcagacacaactaccagttggagctccgcacgaccttgcagcggcgagtggagcccacagtgaccatctccccatccaggacagaggccctcaaccaccacaacctgctggtctgctcggtgacagatttctatccagcccagatcaaagtccggtggtttcggaatgaccaggaggagacagctggcgttgtgtccaccccccttattaggaatggtgactggaccttccagatcctggtgatgctggaaatgactccccagcgtggagacgtctacacctgccacgtggagcaccccagcctccagagccccatcaccgtggagtggcgggctcaatctgaatctgcccagagcaagatgctgagtggcattggaggcttcgtgctggggctgatcttcctcgggctgggccttatcatccatcacaggagtcagaaagggctcctgcactgactcctgagactattttaactgggattggttatcacttttctgtaacgcctgcttgtccctgcccagaattcccagctgtctgtgtcagcctgtccccctgagatcagagtcctacagtggctgtcacgcagccaccaggtcatctcctttcatccccaccttgaggcggatggctgtgaccctacttcctgcactgacccacagcctctgcctgtgcacggccagctgcatctactcaggccccaaggggtttctgtttctattctctcctcagactgctcaagagaagcacatgaaaaccattacctgactttagagcttttttacataattaaacatgatcctgagtt

SEQ ID NO: 96 - DNA, 376 bp, Artificial Sequence
  Description of Artificial sequences:primer
  misc_feature (1)..(376): 3' terminal sequence from clone image:124345. centromere protein f, 350/400ka (mitosin)(CENPF) gene.
  misc_feature (306)..(306): n is a, c, g, or t
  misc_feature (344)..(344): n is a, c, g, or t
  misc_feature (363)..(363): n is a, c, g, or t
ttatagtgcttgtcattttaattgtaacatattaccaaaaagctttatatacatagctttatactatttacattgcagtagaggaatggcaatgctaacaggtgatcagtgcttccaaactttttcaatacctacacatgggagatctaaagagtacaatatatttaagacttctaaggaattgttttctcctcactaataaagcatgccctgactaaagagaagtcctgtagggcacagcctttatctattcaatgactgggcacctcccggggggtactgacacacaaagggccttcactgggnccttacaggttctcactgcccttggggctcccggtccngctttgggggctggggggncaggtcgggcctc

SEQ ID NO: 97 - DNA, 383 bp, Artificial Sequence
  Description of Artificial sequences:primer
  misc_feature (1)..(383): 5' terminal sequence from clone image:124345. centromere protein f, 350/400ka (mitosin)(CENPF) gene.
  misc_feature (2)..(2): n is a, c, g, or t
  misc_feature (322)..(322): n is a, c, g, or t
  misc_feature (339)..(339): n is a, c, g, or t
  misc_feature (364)..(364): n is a, c, g, or t
  misc_feature (374)..(374): n is a, c, g, or t
tngttccttgcttataagccatgaaaagttagagaaagctaaagagatgttagagacacaagtggcccatctgtgttcacagcaatctaaacaagattcccgagggtctcctttgctaggtccagttgttccaggaccatctccaatcccttctgttactgaaaagaggttatcatctgggccaaaataaagcttcaggcaagaggcaaagatccagtggaatatgggagaatggtggaggaccaacacctgctaccccagagagcttttctaaaaaaagcaagaaagcagttcatgagtggttatttcaccctggcagganggacacgggaaggttanttgagtttttgaggccagaggggantttcccggangtttgttaa

SEQ ID NO: 98 - DNA, 10211 bp, Artificial Sequence
  Description of Artificial sequences:primer
  misc_feature (1)..(10211): centromere protein f, 350/400ka (mitosin)(CENPF) gene.
gagaggtcgttttcccgtccccgagagcaagtttatttacaaatgttggagtaataaagaaggcagaacaaaatgagctgggctttggaagaatggaaagaagggctgcctacaagagctcttcagaaaattcaagagcttgaaggacagcttgacaaactgaagaaggaaaagcagcaaaggcagtttcagcttgacagtctcgaggctgcgcctcagaagcaaacacagaaggttgaaaatgaaaaaaccgagggtacaaacctgaaaagggagaatcaaagattgatggaaatatgtgaaagtctggagaaaactaagcagaagatttctcatgaacttcaagtcaaggagtcacaagtgaatttccaggaaggacaactgaattcaggcaaaaaacaaatagaaaaactggaacaggaacttaaaaggtgtaaatctgagcttgaaagaagccaacaagctgcgcagtctgcagatgtctctctgaatccatgcaatacaccacaaaaaatttttacaactccactaacaccaagtcaatattatagtggttccaagtatgaagatctaaaagaaaaatataataaagaggttgaagaacgaaaaagattagaggcagaggttaaagccttgcaggctaaaaaagcaagccagactcttccacaagccaccatgaatcaccgcgacattgcccggcatcaggcttcatcatctgtgttctcatggcagcaagagaagaccccaagtcatctttcatctaattctcaaagaactccaattaggagagatttctctgcatcttacttttctggggaacaagaggtgactccaagtcgatcaactttgcaaatagggaaaagagatgctaatagcagtttctttgacaattctagcagtcctcatcttttggatcaattaaaagcgcagaatcaagagctaagaaacaagattaatgagttggaactacgcctgcaaggacatgaaaaagaaatgaaaggccaagtgaataagtttcaagaactccaactccaactggagaaagcaaaagtggaattaattgaaaaagagaaagttttgaacaaatgtagggatgaactagtgagaacaacagcacaatacgaccaggcgtcaaccaagtatactgcattggaacaaaaactgaaaaaattgacggaagatttgagttgtcagcgacaaaatgcagaaagtgccagatgttctctggaacagaaaattaaggaaaaagaaaaggagtttcaagaggagctctcccgtcaacagcgttctttccaaacactggaccaggagtgcatccagatgaaggccagactcacccaggagttacagcaagccaagaatatgcacaacgtcctgcaggctgaactggataaactcacatcagtaaagcaacagctagaaaacaatttggaagagtttaagcaaaagttgtgcagagctgaacaggcgttccaggcgagtcagatcaaggagaatgagctgaggagaagcatggaggaaatgaagaaggaaaacaacctccttaagagtcactctgagcaaaaggccagagaagtctgccacctggaggcagaactcaagaacatcaaacagtgtttaaatcagagccagaattttgcagaagaaatgaaagcgaagaatacctctcaggaaaccatgttaagagatcttcaagaaaaaataaatcagcaagaaaactccttgactttagaaaaactgaagcttgctgtggctgatctggaaaagcagcgagattgttctcaagaccttttgaagaaaagagaacatcacattgaacaacttaatgataagttaagcaagacagagaaagagtccaaagccttgctgagtgctttagagttaaaaaagaaagaatatgaattgaaagaagagaaaactctgttttcttgttggaaaagtgaaaacgaaaaacttttaactcagatggaatcagaaaaggaaaacttgcagagtaaaattaatcacttggaaacttgtctgaagacacagcaaataaaaagtcatgaatacaacgagagagtaagaacgctggagatggacagagaaaacctaagtgtcgagatcagaaaccttcacaacgtgttagacagtaagtcagtggaggtagagacccagaaactagcttatatggagctacagcagaaagctgagttctcagatcagaaacatcagaaggaaatagaaaatatgtgtttgaagacttctcagcttactgggcaagttgaagatctagaacacaagcttcagttactgtcaaatgaaataatggacaaagaccggtgttaccaagacttgcatgccgaatatgagagcctcagggatctgctaaaatccaaagatgcttctctggtgacaaatgaagatcatcagagaagtcttttggcttttgatcagcagcctgccatgcatcattcctttgcaaatataattggagaacaaggaagcatgccttcagagaggagtgaatgtcgtttagaagcagaccaaagtccgaaaaattctgccatcctacaaaatagagttgattcacttgaattttcattagagtctcaaaaacagatgaactcagacctgcaaaagcagtgtgaagagttggtgcaaatcaaaggagaaatagaagaaaatctcatgaaagcagaacagatgcatcaaagttttgtggctgaaacaagtcagcgcattagtaagttacaggaagacacttctgctcaccagaatgttgttgctgaaaccttaagtgcccttgagaacaaggaaaaagagctgcaacttttaaatgataaggtagaaactgagcaggcagagattcaagaattaaaaaagagcaaccatctacttgaagactctctaaaggagctacaacttttatccgaaaccctaagcttggagaagaaagaaatgagttccatcatttctctaaataaaagggaaattgaagagctgacccaagagaatgggactcttaaggaaattaatgcatccttaaatcaagagaagatgaacttaatccagaaaagtgagagttttgcaaactatatagatgaaagggagaaaagcatttcagagttatctgatcagtacaagcaagaaaaacttattttactacaaagatgtgaagaaaccggaaatgcatatgaggatcttagtcaaaaatacaaagcagcacaggaaaagaattctaaattagaatgcttgctaaatgaatgcactagtctttgtgaaaataggaaaaatgagttggaacagctaaaggaagcatttgcaaaggaacaccaagaattcttaacaaaattagcatttgctgaagaaagaaatcagaatctgatgctagagttggagacagtgcagcaagctctgagatctgagatgacagataaccaaaacaattctaagagcgaggctggtggtttaaagcaagaaatcatgactttaaaggaagaacaaaacaaaatgcaaaaggaagttaatgacttattacaagagaatgaacagctgatgaaggtaatgaagactaaacatgaatgtcaaaatctagaatcagaaccaattaggaactctgtgaaagaaagagagagtgagagaaatcaatgtaattttaaacctcagatggatcttgaagttaaagaaatttctctagatagttataatgcgcagttggtgcaattagaagctatgctaagaaataaggaattaaaacttcaggaaagtgagaaggagaaggagtgcctgcagcatgaattacagacaattagaggagatcttgaaaccagcaatttgcaagacatgcagtcacaagaaattagtggccttaaagactgtgaaatagatgcggaagaaaagtatatttcagggcctcatgagttgtcaacaagtcaaaacgacaatgcacaccttcagtgctctctgcaaacaacaatgaacaagctgaatgagctagagaaaatatgtgaaatactgcaggctgaaaagtatgaactcgtaactgagctgaatgattcaaggtcagaatgtatcacagcaactaggaaaatggcagaagaggtagggaaactactaaatgaagttaaaatattaaatgatgacagtggtcttctccatggtgagttagtggaagacataccaggaggtgaatttggtgaacaaccaaatgaacagcaccctgtgtctttggctccattggacgagagtaattcctacgagcacttgacattgtcagacaaagaagttcaaatgcactttgccgaattgcaagagaaattcttatctttacaaagtgaacacaaaattttacatgatcagcactgtcagatgagctctaaaatgtcagagctgcagacctatgttgactcattaaaggccgaaaatttggtcttgtcaacgaatctgagaaactttcaaggtgacttggtgaaggagatgcagctgggcttggaggaggggctcgttccatccctgtcatcctcttgtgtgcctgacagctctagtcttagcagtttgggagactcctccttttacagagctcttttagaacagacaggagatatgtctcttttgagtaatttagaaggggctgtttcagcaaaccagtgcagtgtagatgaagtattttgcagcagtctgcaggaggagaatctgaccaggaaagaaaccccttcggccccagcgaagggtgttgaagagcttgagtccctctgtgaggtgtaccggcagtccctcgagaagctagaagagaaaatggaaagtcaagggattatgaaaaataaggaaattcaagagctcgagcagttattaagttctgaaaggcaagagcttgactgccttaggaagcagtatttgtcagaaaatgaacagtggcaacagaagctgacaagcgtgactctggagatggagtccaagttggcggcagaaaagaaacagacggaacaactgtcacttgagctggaagtagcacgactccagctacaaggtctggacttaagttctcggtctttgcttggcatcgacacagaagatgctattcaaggccgaaatgagagctgtgacatatcaaaagaacatacttcagaaactacagaaagaacaccaaagcatgatgttcatcagatttgtgataaagatgctcagcaggacctcaatctagacattgagaaaataactgagactggtgcattgaaacccacaggagagtgctctggggaacagtccccagataccaattatgagcctccaggggaagataaaacccagggctcttcagaatgcatttctgaattgtcattttctggtcctaatgctttggtacctatggatttcctggggaatcaggaagatatccataatcttcaactgcgggtaaaagagacatcaaatgagaatttgagattacttcatgtgatagaggaccgtgacagaaaagttgaaagtttgctaaatgaaatgaaagaattagactcaaaactccatttacaggaggtacaactaatgaccaaaattgaagcatgcatagaattggaaaaaatagttggggaacttaagaaagaaaactcagatttaagtgaaaaattggaatatttttcttgtgatcaccaggagttactccagagagtagaaacttctgaaggcctcaattctgatttagaaatgcatgcagataaatcatcacgtgaagatattggagataatgtggccaaggtgaatgacagctggaaggagagatttcttgatgtggaaaatgagctgagtaggatcagatcggagaaagctagcattgagcatgaagccctctacctggaggctgacttagaggtagttcaaacagagaagctatgtttagaaaaagacaatgaaaataagcagaaggttattgtctgccttgaagaagaactctcagtggtcacaagtgagagaaaccagcttcgtggagaattagatactatgtcaaaaaaaaccacggcactggatcagttgtctgaaaaaatgaaggagaaaacacaagagcttgagtctcatcaaagtgagtgtctccattgcattcaggtggcagaggcagaggtgaaggaaaagacggaactccttcagactttgtcctctgatgtgagtgagctgttaaaagacaaaactcatctccaggaaaagctgcagagtttggaaaaggactcacaggcactgtctttgacaaaatgtgagctggaaaaccaaattgcacaactgaataaagagaaagaattgcttgtcaaggaatctgaaagcctgcaggccagactgagtgaatcagattatgaaaagctgaatgtctccaaggccttggaggccgcactggtggagaaaggtgagttcgcattgaggctgagctcaacacaggaggaagtgcatcagctgagaagaggcatcgagaaactgagagttcgcattgaggccgatgaaaagaagcagctgcacatcgcagagaaactgaaagaacgcgagcgggagaatgattcacttaaggataaagttgagaaccttgaaagggaattgcagatgtcagaagaaaaccaggagctagtgattcttgatgccgagaattccaaagcagaagtagagactctaaaaacacaaatagaagagatggccagaagcctgaaagtttttgaattagaccttgtcacgttaaggtctgaaaaagaaaatctgacaaaacaaatacaagaaaaacaaggtcagttgtcagaactagacaagttactctcttcatttaaaagtctgttagaagaaaaggagcaagcagagatacagatcaaagaagaatctaaaactgcagtggagatgcttcagaatcagttaaaggagctaaatgaggcagtagcagccttgtgtggtgaccaagaaattatgaaggccacagaacagagtctagacccaccaatagaggaagagcatcagctgagaaatagcattgaaaagctgagagcccgcctagaagctgatgaaaagaagcagctctgtgtcttacaacaactgaaggaaagtgagcatcatgcagatttacttaagggtagagtggagaaccttgaaagagagctagagatagccaggacaaaccaagagcatgcagctcttgaggcagagaattccaaaggagaggtagagaccctaaaagcaaaaatagaagggatgacccaaagtctgagaggtctggaattagatgttgttactataaggtcagaaaaagaaaatctgacaaatgaattacaaaaagagcaagagcgaatatctgaattagaaataataaattcatcatttgaaaatattttgcaagaaaaagagcaagagaaagtacagatgaaagaaaaatcaagcactgccatggagatgcttcaaacacaattaaaagagctcaatgagagagtggcagccctgcataatgaccaagaagcctgtaaggccaaagagcagaatcttagtagtcaagtagagtgtcttgaacttgagaaggctcagttgctacaaggccttgatgaggccaaaaataattatattgttttgcaatcttcagtgaatggcctcattcaagaagtagaagatggcaagcagaaactggagaagaaggatgaagaaatcagtagactgaaaaatcaaattcaagaccaagagcagcttgtctctaaactgtcccaggtggaaggagagcaccaactttggaaggagcaaaacttagaactgagaaatctgacagtggaattggagcagaagatccaagtgctacaatccaaaaatgcctctttgcaggacacattagaagtgctgcagagttcttacaagaatctagagaatgagcttgaattgacaaaaatggacaaaatgtcctttgttgaaaaagtaaacaaaatgactgcaaaggaaactgagctgcagagggaaatgcatgagatggcacagaaaacagcagagctgcaagaagaactcagtggagagaaaaataggctagctggagagttgcagttactgttggaagaaataaagagcagcaaagatcaattgaaggagctcacactagaaaatagtgaattgaagaagagcctagattgcatgcacaaagaccaggtggaaaaggaagggaaagtgagagaggaaatagctgaatatcagctacggcttcatgaagctgaaaagaaacaccaggctttgcttttggacacaaacaaacagtatgaagtagaaatccagacataccgagagaaattgacttctaaagaagaatgtctcagttcacagaagctggagatagaccttttaaagtctagtaaagaagagctcaataattcattgaaagctactactcagattttggaagaattgaagaaaaccaagatggacaatctaaaatatgtaaatcagttgaagaaggaaaatgaacgtgcccaggggaaaatgaagttgttgatcaaatcctgtaaacagctggaagaggaaaaggagatactgcagaaagaactctctcaacttcaagctgcacaggagaagcagaaaacaggtactgttatggataccaaggtcgatgaattaacaactgagatcaaagaactgaaagaaactcttgaagaaaaaaccaaggaggcagatgaatacttggataagtactgttccttgcttataagccatgaaaagttagagaaagctaaagagatgttagagacacaagtggcccatctgtgttcacagcaatctaaacaagattcccgagggtctcctttgctaggtccagttgttccaggaccatctccaatcccttctgttactgaaaagaggttatcatctggccaaaataaagcttcaggcaagaggcaaagatccagtggaatatgggagaatggtggaggaccaacacctgctaccccagagagcttttctaaaaaaagcaagaaagcagtcatgagtggtattcaccctgcagaagacacggaaggtactgagtttgagccagagggacttccagaagttgtaaagaaagggtttgctgacatcccgacaggaaagactagcccatatatcctgcgaagaacaaccatggcaactcggaccagcccccgcctggctgcacagaagttagcgctatccccactgagtctcggcaaagaaaatcttgcagagtcctccaaaccaacagctggtggcagcagatcacaaaaggtcaaagttgctcagcggagcccagtagattcaggcaccatcctccgagaacccaccacgaaatccgtcccagtcaataatcttcctgagagaagtccgactgacagccccagagagggcctgagggtcaagcgaggccgacttgtccccagccccaaagctggactggagtccaagggcagtgagaactgtaaggtccagtgaaggcactttgtgtgtcagtacccctgggaggtgccagtcattgaatagataaggctgtgcctacaggacttctctttagtcagggcatgctttattagtgaggagaaaacaattccttagaagtcttaaatatattgtactctttagatctcccatgtgtaggtattgaaaaagtttggaagcactgatcacctgttagcattgccattcctctactgcaatgtaaatagtataaagctatgtatataaagctttttggtaatatgttacaattaaaatgacaagcactatatcacaatctctgtttgtatgtgggttttacactaaaaaaatgcaaaacacattttattcttctaattaacagctcctaggaaaatgtagacttttgctttatgatattctatctgtagtatgaggcatggaatagttttgtatcgggaatttctcagagctgagtaaaatgaaggaaaagcatgttatgtgtttttaaggaaaatgtgcacacatatacatgtaggagtgtttatctttctcttacaatctgttttagacatctttgcttatgaaacctgtacatatgtgtgtgtgggtatgtgtttatttccagtgagggctgcaggcttcctagaggtgtgctataccatgcgtctgtcgttgtgcttttttctgtttttagaccaattttttacagttctttggtaagcattgtcgtatctggtgatggattaacatatagcctttgttttctaataaaatagtcgccttcgttttctgtaaaaaaaaaaaaaaaaaaaaaa

SEQ ID NO: 99 - DNA, 438 bp, Artificial Sequence
  Description of Artificial sequences:primer
  misc_feature (1)..(438): 3' terminal sequence from clone image:124554. colony stimulating factor 1 (macrophage)(CSF1) gene.
  misc_feature (134)..(134): n is a, c, g, or t
  misc_feature (206)..(206): n is a, c, g, or t
ttttgcagcttgtgcacttcttttattattaaatatataagcagcttcctatcttttaaatagatatttaaatgactttatataaaataattcaccacttccaagtataaaaacaaaatctcacagtgcgtgancaatgtcctctcttgacttctcagagaacagaaggggttcctgagcaggtagcctggggggacaccagaggngcctctggggctcctcctgctctgatgccaccaagtgctcaaaaagagcttctgcagtggggttgggattgcttttttgacctttaaaatattatatgtttaaggtagggggggatgaaggggggaatgccctttttatttttcttcccattttaaaaatatgtgttttctaggcatccaaatatagggggctgtggcctgggagggctaggccccctttgccaggttcact

SEQ ID NO: 100 - DNA, 2749 bp, Artificial Sequence
  Description of Artificial sequences:primer
  misc_feature (1)..(2749): colony stimulating factor 1 (macrophage)(CSF1) gene.
gagggctggccagtgaggctcggcccggggaaagtgaaagtttgcctgggtcctctcggcgccagagccgctctccgcatcccaggacagcggtgcggccctcggccggggcgcccactccgcagcagccagcgagcgagcgagcgagcgagggcggccgacgcgcccggccgggacccagctgcccgtatgaccgcgccgggcgccgccgggcgctgccctcccacgacatggctgggctccctgctgttgttggtctgtctcctggcgagcaggagtatcaccgaggaggtgtcggagtactgtagccacatgattgggagtggacacctgcagtctctgcagcggctgattgacagtcagatggagacctcgtgccaaattacatttgagtttgtagaccaggaacagttgaaagatccagtgtgctaccttaagaaggcatttctcctggtacaagacataatggaggacaccatgcgcttcagagataacacccccaatgccatcgccattgtgcagctgcaggaactctctttgaggctgaagagctgcttcaccaaggattatgaagagcatgacaaggcctgcgtccgaactttctatgagacacctctccagttgctggagaaggtcaagaatgtctttaatgaaacaaagaatctccttgacaaggactggaatattttcagcaagaactgcaacaacagctttgctgaatgctccagccaagatgtggtgaccaagcctgattgcaactgcctgtaccccaaagccatccctagcagtgacccggcctctgtctcccctcatcagcccctcgccccctccatggcccctgtggctggcttgacctgggaggactctgagggaactgagggcagctccctcttgcctggtgagcagcccctgcacacagtggatccaggcagtgccaagcagcggccacccaggagcacctgccagagctttgagccgccagagaccccagttgtcaaggacagcaccatcggtggctcaccacagcctcgcccctctgtcggggccttcaaccccgggatggaggatattcttgactctgcaatgggcactaattgggtcccagaagaagcctctggagaggccagtgagattcccgtaccccaagggacagagctttccccctccaggccaggagggggcagcatgcagacagagcccgccagacccagcaacttcctctcagcatcttctccactccctgcatcagcaaagggccaacagccggcagatgtaactggtacagccttgcccagggtgggccccgtgaggcccactggccaggactggaatcacaccccccagaagacagaccatccatctgccctgctcagagaccccccggagccaggctctcccaggatctcatcactgcgcccccagggcctcagcaacccctccaccctctctgctcagccacagctttccagaagccactcctcgggcagcgtgctgccccttggggagctggagggcaggaggagcaccagggatcggaggagccccgcagagccagaaggaggaccagcaagtgaaggggcagccaggcccctgccccgttttaactccgttcctttgactgacacaggccatgagaggcagtccgagggatcctccagcccgcagctccaggagtctgtcttccacctgctggtgcccagtgtcatcctggtcttgctggccgtcggaggcctcttgttctacaggtggaggcggcggagccatcaagagcctcagagagcggattctcccttggagcaaccagagggcagccccctgactcaggatgacagacaggtggaactgccagtgtagagggaattctaagctggacgcacagaacagtctctccgtgggaggagacattatggggcgtccaccaccacccctccctggccatcctcctggaatgtggtctgccctccaccagagctcctgcctgccaggactggaccagagcagccaggctggggcccctctgtctcaacccgcagacccttgactgaatgagagaggccagaggatgctccccatgctgccactatttattgtgagccctggaggctcccatgtgcttgaggaaggctggtgagcccggctcaggaccctcttccctcaggggctgcaccctcctctcactcccttccatgccggaacccaggccagggacccaccggcctgtggtttgtgggaaagcagggtggacgctgaggagtgaaagaaccctgcacccagagggcctgcctggtgccaaggtatcccagcctggacaggcatggacctgtctccagagagaggagcctgaagttcgtggggcgggacagcgtcggcctgatttcccgtaaaggtgtgcagcctgagagacgggaagaggaggcctctggacctgctggtctgcactgacagcctgaagggtctacaccctcggctcacctaagtgccctgtgctggttgccaggcgcagaggggaggccagccctgccctcaggacctgcctgacctgccagtgatgccaagagggggatcaagcactggcctctgcccctcctccttccagcacctgccagagcttctccaggaggccaagcagaggctcccctcatgaaggaagccattgcactgtgaacactgtacctgcctgctgaacagcctgcccccgtccatccatgagccagcatccgtccgtcctccactctccagcctctcccca

SEQ ID NO: 101 - DNA, 416 bp, Artificial Sequence
  Description of Artificial sequences:primer
  misc_feature (1)..(416): 3' terminal sequence from clone image:125806. n-deacetylase/n-sulfotransferase (heparan glucosaminyl) 3(NDST3) gene.
  misc_feature (186)..(186): n is a, c, g, or t
tatccacgtgccagcacatggaagaaactgttcttttttctcatttgaagaggtatatttttcaactgccttttggtagcttctggaagctttggaaaaggtgtgttctacatggacgatgaagtctcaagttttctctcagtgctatcttactttctgcagctcctgtctcagccaggatggagnaggctgacccagtttgtgcagcagctttgagagttccacgttgtgatctcgatagtagcttgacagaaatgtcctgctatcagaatccattgggagggtattttcttcctttgctctttccaaggcattttgttttaccttcttccagtaactgacaccaggaaacctttatgaggaatcaaacgttaaagcttctgaggtaattataatgagggcaaggctcctaggaa

SEQ ID NO: 102 - DNA, 213 bp, Artificial Sequence
  Description of Artificial sequences:primer
  misc_feature (1)..(213): 5' terminal sequence from clone image:125806. n-deacetylase/n-sulfotransferase (heparan glucosaminyl) 3(NDST3) gene.
  misc_feature (1)..(1): n is a, c, g, or t
ntccactcagaggaagcccctaaaagagctgcttctctggttcccaaagccaagattatcaccattctcattgacccttcagaccgagcatactcctggtaccagcatcagcgattcacatgaagaccctgcagctctgaagtttagcttctacgagtgatctcagcagggccccgtgcacccttggagctcagagccttgcagaagagatgt

SEQ ID NO: 103 - DNA, 3188 bp, Artificial Sequence
  Description of Artificial sequences:primer
  misc_feature (1)..(3188): n-deacetylase/n-sulfotransferase (heparan glucosaminyl) 3(NDST3) gene.
ccggtcccttggcgacgggtcttgcatgtgacactcttgccctctagtgcctcaccagcttggtagcagtttgatggctaatattaataagatgttacataacatgagagtactgggccaggactggtgttgctaccacttgtaaagtcaaaaagcctgagccgatggtaacgagtggtactgtttccgtttcttttccatctattgcaactttctcaagcattttcagctctgaactttaattccagactgtattttctgtgagtcctgatcaagtgatacaaatgagctgcaatggtgacataaactcttgacagagattggaaaagtagctggaacaccatcttttcttttaactttttatggtgcttctgttggcatagttggggaaagcacctacaacatgagttttatcatgaagcttcacagacactttcaaagaacagtcattctgcttgccactttttgtatggtgagcattatcatttctgcttactacctgtacagtggctacaaacaggaaaatgaactctctgagacggcttcagaagttgactgtggcgacctccaacacctaccatatcaactaatggaagtgaaagcaatgaagctttttgatgcctcaaggacagaccccacagtcctagtatttgtagagagccagtactcatctcttggtcaagacatcattatgattctagaatcaagtagattccagtatcacattgaaattgcccctggaaagggagatctcccagtgcttatagacaaaatgaaaggcaaatacattctcattatttatgagaatattttaaagtatataaatatggattcctggaatcgaagccttctagataaatactgtgtagaatatggtgtgggtgtcattggattccacaaaactagtgagaagagtgtacagagctttcagttaaaaggtttccctttttccatatatggaaatcttgcagtaaaagattgttgtattaatcctcattctccattgattcgtgtgaccaaatcttccaagcttgaaaaaggttctttacctggaactgactggacagtttttcagattaatcattcagcctatcaaccagtaatatttgccaaagtaaagaccccagaaaacctttctccttccatctctaaaggtgctttttatgccactattatacatgacctggggcttcatgatggaattcaaagggttctttttggcaacaacttgaacttttggctgcacaagctcatcttcatagatgccatctccttcttatcagggaagaggctgacattgtccttggacaggtacattcttgtggatattgatgatatatttgtgggaaaagagggaacaagaatgaacaccaatgatgtaaaggccctgcttgatactcagaatcttttgcgtgcacaaatcacaaattttacattcaacctgggattttcagggaaattttaccatacaggaactgaagaggaagatgaaggagatgactgtctgttggggtctgtggatgagttctggtggtttcctcacatgtggagccatatgcagccccacctcttccacaatgagtcatctttggtggagcagatgattctcaacaaaaaatttgccttagagcacggcattccaacggacatgggctacgctgtggcccctcaccattcgggcgtctaccctgtacatgttcagctttatgaggcctggaagaaggtctggaatattaaaatcaccagcactgaagaatatccacatctgaagccagctagataccggaggggttttatccacaaaaacatcatggttctcccaagacaaacctgtgggcttttcactcacaccattttctacaaagaatatccagggggtcctaaagagctggataagagtatccaaggaggagaacttttcttcactgtcgtcctcaaccctatcagcattttcatgacccatttgtccaactatgggaatgaccgactgggattatatacatttgttaatctggccaactttgtgaagagctggaccaacctgcgacttcagactctgcctccagtacaactggcccacaagtattttgagctgtttcctgatcagaaagaccctctctggcagaatccttgcgatgacaaacgccacagagacatttggtctaaagaaaaaacttgtgatcgcttaccaaaattcttggtaataggaccccagaaaactggtaccactgctttgtatttgttcctggttatgcatccttccatccttagtaactcccccagcccaaaaacctttgaggaggtacagttctttaatagaaataactaccacagggggattgattggtatatggatttcttcccagtcccatctaatgtcactaccgactttttgtttgagaagagtgccaattacttccactcagaggaagcccctaaaagagctgcttctctggttcccaaagccaagattatcaccattctcattgacccttcagaccgagcatactcctggtaccagcatcagcgatcacatgaagaccctgcagctctgaagtttagcttctacgaagtgatctcagcagggccccgtgcaccctcggagctcagagccttgcagaagagatgtttggtcccggggtggtatgccagccacatcgagagatggcttgtttatttccccccatttcagttgctaattattgatgggcaacaactaagaactgatcctgctacagtgatggatgaagtacagaagtttctaggagtcttgcctcattataattactcagaagctttaacgtttgattctcataaaggtttctggtgtcagttactggaagaaggtaaaacaaaatgccttggaaagagcaaaggaagaaaataccctccaatggattctgatagcaggacatttctgtcaagctactatcgagatcacaacgtggaactctcaaagctgctgcacaaactgggtcagcctctgccatcctggctgagacaggagctgcagaaagtaagatagcactgagagaaaacttgagacttcatcgtccatgtagaacacaccttttccaaagcttccagaagctaccaaaaggcagttgaaaaatatacctcttcaaatgagaaaaaagaacagtttcttccatgtgctggcacgtggatgattagaaaaaaaaaaaaaa

SEQ ID NO: 104 - DNA, 183 bp, Artificial Sequence
  Description of Artificial sequences:primer
  misc_feature (1)..(183): 3' terminal sequence from clone image:127394. spleen focus forming virus (sffv) proviral integration oncogene spi1(SPI1) gene.
  misc_feature (58)..(58): n is a, c, g, or t
ataactttacttgttttttgggaggagattaatgggtgggaggggtgagaggggaganctgatttacatacggacttgagactcccaaggcagtaccccgggtcgtcctctgcaaggttgccccggtgggtctgacgcccagctggctccgggagccggggtggagtcctgggagggaggcga

SEQ ID NO: 105 - DNA, 269 bp, Artificial Sequence
  Description of Artificial sequences:primer
  misc_feature (1)..(269): 5' terminal sequence from clone image:127394. spleen focus forming virus (sffv) proviral integration oncogene spi1(SPI1) gene.
  misc_feature (57)..(57): n is a, c, g, or t
  misc_feature (174)..(175): n is a, c, g, or t
  misc_feature (236)..(236): n is a, c, g, or t
  misc_feature (252)..(252): n is a, c, g, or t
aacgccaaacgcacgagtattacccctatctcagcagtgatggggagagccatagcnaccattactgggacttccacccccaccacgtgcacagcgagttcgagagcttcgccgagaacaacttcacggagctccagagcgtgcagcccccgcagctgcagcagcttctaccgnncacatggagctggagcagatgcacgtcctcgatacccccatggtgccaccccatcccagtnttggccaccaggtcanctacctgccccggatgt

SEQ ID NO: 106 - DNA, 1364 bp, Artificial Sequence
  Description of Artificial sequences:primer
  misc_feature (1)..(1364): spleen focus forming virus (sffv) proviral integration oncogene spi1(SPI1) gene.
aaaatcaggaacttgtgctggccctgcaatgtcaagggagggggctcacccagggctcctgtagctcagggggcaggcctgagccctgcacccgccccacgaccgtccagcccctgacgggcaccccatcctgaggggctctgcattggcccccaccgaggcaggggatctgaccgactcggagcccggctggatgttacaggcgtgcaaaatggaagggtttcccctcgtcccccctccatcagaagacctggtgccctatgacacggatctataccaacgccaaacgcacgagtattacccctatctcagcagtgatggggagagccatagcgaccattactgggacttccacccccaccacgtgcacagcgagttcgagagcttcgccgagaacaacttcacggagctccagagcgtgcagcccccgcagctgcagcagctctaccgccacatggagctggagcagatgcacgtcctcgatacccccatggtgccaccccatcccagtcttggccaccaggtctcctacctgccccggatgtgcctccagtacccatccctgtccccagcccagcccagctcagatgaggaggagggcgagcggcagagccccccactggaggtgtctgacggcgaggcggatggcctggagcccgggcctgggctcctgcctggggagacaggcagcaagaagaagatccgcctgtaccagttcctgttggacctgctccgcagcggcgacatgaaggacagcatctggtgggtggacaaggacaagggcaccttccagttctcgtccaagcacaaggaggcgctggcgcaccgctggggcatccagaagggcaaccgcaagaagatgacctaccagaagatggcgcgcgcgctgcgcaactacggcaagacgggcgaggtcaagaaggtgaagaagaagctcacctaccagttcagcggcgaagtgctgggccgcgggggcctggccgagcggcgccacccgccccactgagcccgcagcccccgccggccccgccaggcctccccgctggccatagcattaagccctcgcccggcccggacacagggaggacgctcccggggcccagaggcaggactgtggcgggccgggctccgtcacccgcccctccccccactccaggccccctccacatcccgcttcgcctccctccaggactccaccccggctcccgacgccagctgggcgtcagacccaccggcaaccttgcagaggacgacccggggtactgccttgggagtctcaagtccgtatgtaaatcagatctcccctctcacccctcccacccattaacctcctcccaaaaaacaagtaaagttattctcaatcc

SEQ ID NO: 107 - DNA, 223 bp, Artificial Sequence
  Description of Artificial sequences:primer
  misc_feature (1)..(223): 3' terminal sequence from clone image:127950. atp synthase, h+ transporting, mitochondrial f1 complex, gamma polypeptide 1(ATP5C1) gene.
  misc_feature (6)..(8): n is a, c, g, or t
  misc_feature (59)..(59): n is a, c, g, or t
  misc_feature (143)..(143): n is a, c, g, or t
  misc_feature (197)..(197): n is a, c, g, or t
  misc_feature (200)..(200): n is a, c, g, or t
tatttnnnagttgtttattttaagataatttacaaatatcttgctgtcttcagtaattnaaataatggaggaacagtttcttcggacaaaggcagcagtaagctaaaagcaaaatcaactggctgaattttccttctttaccncttgtctgaggatgggacttgattttcattaatccagagctgcagcaccagagntantttcaatcaactcttttgtgatg

SEQ ID NO: 108 - DNA, 312 bp, Artificial Sequence
  Description of Artificial sequences:primer
  misc_feature (1)..(312): 5' terminal sequence from clone image:127950. atp synthase, h+ transporting, mitochondrial f1 complex, gamma polypeptide 1(ATP5C1) gene.
  misc_feature (55)..(55): n is a, c, g, or t
  misc_feature (282)..(282): n is a, c, g, or t
  misc_feature (292)..(292): n is a, c, g, or t
  misc_feature (297)..(297): n is a, c, g, or t
tccatcaaaaacatccagaaaattaccaagtctatgaaaatggtagcggcaaaanatatgcccgatctgagagagagctgaaaccagctcgaatatatggattgggatctttagctctgtatgaaaaagctgatatcaaggggcctgaagacaagaagaaacacctccttattggtgtgtcctcagatcgaggactgtgtgggtgctattcattcctccattgctaaacagatgaaaagcgaggttgctacactaacagcagctggggaaagaagttatggnttgttggganttggngacaaaatcagaggg

SEQ ID NO: 109 - DNA, 1078 bp, Artificial Sequence
  Description of Artificial sequences:primer
  misc_feature (1)..(1078): atp synthase, h+ transporting, mitochondrial f1 complex, gamma polypeptide 1(ATP5C1) gene.
ctgaccgaccttcagcagggctgtggctaccatgttctctcgcgcgggtgtcgctgggctgtcggcctggaccttgcagccgcaatggattcaagttcgaaatatggcaactttgaaagatatcaccaggagactaaagtccatcaaaaacatccagaaaattaccaagtctatgaaaatggtagcggcagcaaaatatgcccgagctgagagagagctgaaaccagctcgaatatatggattgggatctttagctctgtatgaaaaagctgatatcaaggggcctgaagacaagaagaaacacctccttattggtgtgtcctcagatcgaggactgtgtggtgctattcattcctccattgctaaacagatgaaaagcgaggttgctacactaacagcagctgggaaagaagttatgcttgttggaattggtgacaaaatcagaggcatactttataggactcattctgaccagtttctggtggcattcaaagaagtgggaagaaagccccccacttttggagatgcgtcagtcattgcccttgaattactaaattctggatatgaatttgatgaaggctccatcatctttaataaattcaggtctgtcatctcctataagacagaagaaaagcccatcttttcccttaataccgttgcaagtgctgacagcatgagtatctatgacgatattgatgctgacgtgctgcaaaattaccaagaatacaatctggccaacatcatctactactctctgaaggagtccaccactagtgagcagagtgccaggatgacagccatggacaatgccagcaagaatgcttctgagatgattgacaaattgacattgacattcaaccgtacccgccaagctgtcatcacaaaagagttgattgaaattatctctggtgctgcagctctgtaaagaaggaaaattcagccagttgattttgtttttagcttactgctgcctttgtccgaagaaactgttcctccattatttgaattactgaagacagcaagatatttgtaaattatcttaaaataaacaacttaaaataaaatcattgtttttctt

SEQ ID NO: 110 - DNA, 370 bp, Artificial Sequence
  Description of Artificial sequences:primer
  misc_feature (1)..(370): 3' terminal sequence from clone image:128413. tumor necrosis factor (ligand) superfamily, member 10(TNFSF10) gene.
  misc_feature (75)..(75): n is a, c, g, or t
  misc_feature (189)..(189): n is a, c, g, or t
  misc_feature (219)..(219): n is a, c, g, or t
  misc_feature (254)..(254): n is a, c, g, or t
  misc_feature (309)..(309): n is a, c, g, or t
  misc_feature (322)..(322): n is a, c, g, or t
  misc_feature (340)..(340): n is a, c, g, or t
  misc_feature (347)..(347): n is a, c, g, or t
ttttttttcaatgtgaaaataaacatttattataaaaattagttttgacattttaaagtgaatgcagacaaggtnttttccagttcaaaaggtccattgtaagctagagaagtaaattccaaggctggcaataactgactcatattcttcacaagtggcctagacaataagggaaccattcacctcaanttcacagagccatggaatcacctctgcttncccatgaccttttccatatccttcctactctggtntttcccaccatggacaaggacttgaaacatactttttaaaaatctcatcttgggntaggggacggggngggggctcacatctgggnaatcccntccttgggggggggggccaggga

SEQ ID NO: 111 - DNA, 387 bp, Artificial Sequence
  Description of Artificial sequences:primer
  misc_feature (1)..(387): 5' terminal sequence from clone image:128413. tumor necrosis factor (ligand) superfamily, member 10(TNFSF10) gene.
  misc_feature (282)..(282): n is a, c, g, or t
  misc_feature (310)..(310): n is a, c, g, or t
  misc_feature (318)..(318): n is a, c, g, or t
  misc_feature (362)..(362): n is a, c, g, or t
gctgaaagatctttcaggactctacctcatatcagtttgctagcagaaatctagaagactgtcagcttccaaacattaatgcaatggttaacatcttctgtctttataatctactccttgtaaagactgtagaagaaagagcaacaatccatctctcaagtagtgtatcacagtagtagcctccaggtttccttaagggacaacatccttaagtcaaaagagagaagaggcaccacttaaaagatcgcagtttgccgggtgcagtggcttcacacctgttantcccaacattttgggggaacccaaggtngggtaggntcacgaggttcaagaggttccaagaccataggttgacccaaccntaggttggaaacccccttcttttta

SEQ ID NO: 112 - DNA, 1776 bp, Artificial Sequence
  Description of Artificial sequences:primer
  misc_feature (1)..(1776): tumor necrosis factor (ligand) superfamily, member 10(TNFSF10) gene.
tttcatttcctcactgactataaaagaatagagaaggaagggcttcagtgaccggctgcctggctgacttacagcagtcagactctgacaggatcatggctatgatggaggtccaggggggacccagcctgggacagacctgcgtgctgatcgtgatcttcacagtgctcctgcagtctctctgtgtggctgtaacttacgtgtactttaccaacgagctgaagcagatgcaggacaagtactccaaaagtggcattgcttgtttcttaaaagaagatgacagttattgggaccccaatgacgaagagagtatgaacagcccctgctggcaagtcaagtggcaactccgtcagctcgttagaaagatgattttgagaacctctgaggaaaccatttctacagttcaagaaaagcaacaaaatatttctcccctagtgagagaaagaggtcctcagagagtagcagctcacataactgggaccagaggaagaagcaacacattgtcttctccaaactccaagaatgaaaaggctctgggccgcaaaataaactcctgggaatcatcaaggagtgggcattcattcctgagcaacttgcacttgaggaatggtgaactggtcatccatgaaaaagggttttactacatctattcccaaacatactttcgatttcaggaggaaataaaagaaaacacaaagaacgacaaacaaatggtccaatatatttacaaatacacaagttatcctgaccctatattgttgatgaaaagtgctagaaatagttgttggtctaaagatgcagaatatggactctattccatctatcaagggggaatatttgagcttaaggaaaatgacagaatttttgtttctgtaacaaatgagcacttgatagacatggaccatgaagccagttttttcggggcctttttagttggctaactgacctggaaagaaaaagcaataacctcaaagtgactattcagttttcaggatgatacactatgaagatgtttcaaaaaatctgaccaaaacaaacaaacagaaaacagaaaacaaaaaaacctctatgcaatctgagtagagcagccacaaccaaaaaattctacaacacacactgttctgaaagtgactcacttatcccaagagaatgaaattgctgaaagatctttcaggactctacctcatatcagtttgctagcagaaatctagaagactgtcagcttccaaacattaatgcaatggttaacatcttctgtctttataatctactccttgtaaagactgtagaagaaagagcaacaatccatctctcaagtagtgtatcacagtagtagcctccaggtttccttaagggacaacatccttaagtcaaaagagagaagaggcaccactaaaagatcgcagtttgcctggtgcagtggctcacacctgtaatcccaacattttgggaacccaaggtgggtagatcacgagatcaagagatcaagaccatagtgaccaacatagtgaaaccccatctctactgaaagtacaaaaattagctgggtgtgttggcacatgcctgtagtcccagctacttgagaggctgaggcaagagaattgtttgaacccgggaggcagaggttgcagtgtggtgagatcatgccactacactccagcctggcgacagagcgagacttggtttcaaaaaaaaaaaaaaaaaaaacttcagtaagtacgtgttatttttttcaataaaattctattacagtatgtcaaaaaaaaaaaaaaaaaa

SEQ ID NO: 113 - DNA, 342 bp, Artificial Sequence
  Description of Artificial sequences:primer
  misc_feature (1)..(342): 3' terminal sequence from clone image:129112. aspecific bcl2 are-binding protein 2(ASBABP2) gene.
tgggaattaactcgtcatttcattccttcagtcatcttctgtgtaggtgaccggagcactgagaggcagctctgatgcactattgtgtgtcagcagctcaaaggccctaaaacactgaaggttctgcatctgaagtattagattgttagcagcaaaatatgaaagatgaggtggacagtcctctaagccctatttagggaagcttttccaagccacaatcttaactacctacccaaaggatttgcattacccccagattctgtgccaacaaccttttaagggaaatacagtccttgggggaaatgaggttttgatgggtgaattggggggtgtttagggaaa

SEQ ID NO: 114 - DNA, 1090 bp, Artificial Sequence
  Description of Artificial sequences:primer
  misc_feature (1)..(1090): aspecific bcl2 are-binding protein 2(ASBABP2) gene.
gaaatgtataacagccaaaagagaaattatgtccctgttgtacagaagttagaatttttgactccaggcagcagtttgctcagtgatcttgaacaagttatccaattgcctctacatttgcatcagtttctctagctgcaaaatggggataatactatatacctacctcacagtgggagggcaggagattttgaggccctgaggttttaggtgggctgtgagggccaacgcttgacacaaagtccatgggttattattcaagaatgcacaggcccatcggccttttagaaagacaagacagggagtgcttgtttgatatttcaaggaataaagccggagctcctgaattgtagtccaccttaaaagagagacctgtattggagaatattttatttttttggcaaatttgatcttaccctttaccagttctataatttggttaaaagctgattatgtcctacaatgtcaaagtcagctaactgtcgtctacttaagacttctggtcatttccaacttatagaggaagggagtctctaaaatctcttcttcagaaggcacctcacttctcagacttaaaattccacatcaagtgttccattaaaagaagataaggcattctgagtgcaaacaaatgggggcttcttaaactacacaccagcagtcagtgaggaaaactttgaacaattattgagttgctttcttgggtctctataatcaataacctgtctgcagatatctatctatataaagatattatatataaatataaatttacatatatatgcacatgtatatatagttgtacatatatgtgtgtatatatatacttaaatgtaatatttacaaaataaaactgtgatctcgtctagagaaaatgtattcatattacaaactgctcttccatatttatgtaccatattatacctttttattattgttataattattatgggtatttctaattaatatgatgttgaaacctgtttggcaccttctggaagctaccaaaaaaatgacactccattgaagtgcttaaaagctgttctcataagaattctactggcctattgtaaaaaaaaaaaaaaaaaaa

SEQ ID NO: 115 - DNA, 319 bp, Artificial Sequence
  Description of Artificial sequences:primer
  misc_feature (1)..(319): 3' terminal sequence from clone image:129146. cytochrome c oxidase subunit viia polypeptide 2 like(COX7A2L) gene.
ttaagccatccaagtaaaaaaaaaaattttaatttaacaatgaaaaaggaacttcaaagggtttatgccaaaaaacaaaccagtcctctgcagcctaactcatttgtttttgggctgcgaccattgtagagggcgatcaggcagtagatggtccctcccacagtcagcgccatggtggtccggtaaagcatttggtcaggcaggcctcgtttcaggtagacgggcacaccatcagctttctggaaaaacttttgtagctctggaactttgtttttcccagcataatcataccctgtgggaatcggaggtcagtttagtt

SEQ ID NO: 116 - DNA, 334 bp, Artificial Sequence
  Description of Artificial sequences:primer
  misc_feature (1)..(334): 5' terminal sequence from clone image:129146. cytochrome c oxidase subunit viia polypeptide 2 like(COX7A2L) gene.
  misc_feature (13)..(13): n is a, c, g, or t
  misc_feature (107)..(107): n is a, c, g, or t
  misc_feature (250)..(250): n is a, c, g, or t
  misc_feature (327)..(327): n is a, c, g, or t
gcagcggatgtgnaagccggactctgggcgtcatgtactacaagtttagtggcttcacgcagaagttggcaggagcatgggcttcggaggcctatagcccgcagatntaaagcctgtggtttccacagaagcaccacctatcatatttgccacaccaactaaactgacctccgattccacagtgtatgattatgctgggaaaaacaaagttccagagctacaaaagtttttccagaaagctgatggtgtncccgtctacctgaaacgaggcctgccttgaccaaatgctttaccggaccaccatgggcgcttgactgtgggagggancatctta

SEQ ID NO: 117 - DNA, 1145 bp, Artificial Sequence
  Description of Artificial sequences:primer
  misc_feature (1)..(1145): cytochrome c oxidase subunit viia polypeptide 2 like(COX7A2L) gene.
cttctctggggcggtcgcgttggcagcggatgcgggaagccggactctgggcgtcatgtactacaagtttagtggcttcacgcagaagttggcaggagcatgggcttcggaggcctatagcccgcagggattaaagcctgtggtttccacagaagcaccacctatcatatttgccacaccaactaaactgacctccgattccacagtgtatgattatgctgggaaaaacaaagttccagagctacaaaagtttttccagaaagctgatggtgtgcccgtctacctgaaacgaggcctgcctgaccaaatgctttaccggaccaccatggcgctgactgtgggagggaccatctactgcctgatcgccctctacatggcttcgcagcccaaaaacaaatgagttaggctgcagaggactggtttgttttttggcataaaccctttgaagttcctttttcattgttaaattaaaatttttttttttacttggatggcttaacatttttgcaagaaaaataggaagatatgaagatgatgttttggtttgtttatgaaatgcatatggcttgtcagagctcattcgacagttaaagccattgtttaaagaaatggtgctttgctctgtgtttgtgctcctgatttccctggaggttctggatgaaggctgaacacaggcttgttaatgtcagtctgtgctgaggacctcagggacttgaggttgcatttttgagcatggggtgcaggagcctttctggatttggatgtggctatggaaagaacacagaagccaaggtcatgtgcatgaaatgaggagtttgagttagtcacctcggggattttttccattttgcagtaaaatgttaaattaatgtagcctgcctctatttgttgggcaggtaatttcaaagggttatttgcctcatctcctatctttagtgaaatcttatgtgtaattattccaccgtgggaacagagaatacctgtttagtgttgcactttagactggtgtctgttttgttaatgcagctgtgccacaaattctcctttatcttttaaaaatgttatagctttaaattttgatttattttgactgtggaataaatacatgaatgaaaaaaaaaaaaaaaaaaaaaaaaaaaaaaaaa

SEQ ID NO: 118 - DNA, 398 bp, Artificial Sequence
  Description of Artificial sequences:primer
  misc_feature (1)..(398): 3' terminal sequence from clone image:129227. minor histocompatibility antigen ha-8(XTP5) gene.
  misc_feature (69)..(69): n is a, c, g, or t
  misc_feature (381)..(381): n is a, c, g, or t
gatggggatctcgctgtgttggcgaggctggtctcaaactcctggcctcaagcaatcctcctgccttgncgttccaaagtgctgggattaacagtgtgagccactgcaccaggcctttatggtgtgtctaaatggcacttccttagagacctttccgatcacctgaagtacatgcccaacagaccatcccaattattctctacctcattctattgtctatttccttgtaggttttatcatgagtactattttgtctttttatatcctccctcacctcgaacgaaattcgacttccaagagggcaagaaccttatttgcctttattcctgacatgtagctgagtgactagcctcggctacgtgtcagtgggagctcaacagnaactgggtaaatgaata

SEQ ID NO: 119 - DNA, 318 bp, Artificial Sequence
  Description of Artificial sequences:primer
  misc_feature (1)..(318): 5' terminal sequence from clone image:129227. minor histocompatibility antigen ha-8(XTP5) gene.
  misc_feature (31)..(31): n is a, c, g, or t
  misc_feature (275)..(275): n is a, c, g, or t
  misc_feature (302)..(302): n is a, c, g, or t
aagcggagaggcggttcgggatccgctgcgnagctgttctcggtcccacgtgtgcgagttgctacgatggaagttaaagggaaaaagcaattcacaggaaagagtacaaagacagcacaagaaaaaaacagatttcataaaaatagtgattctggttcttcaaagacatttccaacaaggaaagttgctaaagaaggtggacctaaagtcacatctaggaactttgagaaaagtatcacaaaacttgggaaaaagggtgtaaagcagttcaagantaagcagccaaggggacaaatcaccanagaacaattccagccg

SEQ ID NO: 120 - DNA, 2220 bp, Artificial Sequence
  Description of Artificial sequences:primer
  misc_feature (1)..(2220): minor histocompatibility antigen ha-8(XTP5) gene.
cccacgcgtccgatggaagttaaagggaaaaagcaattcacaggaaagaatacaaagacagcacaagaaaaaaacagatttcataaaaatagtgattctggttcttcaaagacatttccaacaaggaaagttgctaaagaaggtggacctaaagtcacatctaggaactttgagaaaagtatcacaaaacttgggaaaaagggtgtaaagcagttcaagaataagcagcaaggggacaaatcaccaaagaacaaattccagccggcaaataaattcaacaagaagagaaaattccagccagatggtagaagcgatgaatcagcagccaagaagcccaaatgggatgacttcaaaaagaagaagaaagaactgaagcaaagcagacaactcagtgataaaaccaactatgacattgttgttcgggcaaagcagatgtgggagattttaagaagaaaagactgtgacaaagaaaaaagagtaaagttaatgagtgatttgcagaagttgattcaagggaaaattaaaactattgcatttgcacacgattcaactcgtgtgatccagtgttacattcagtatggtaatgaagaacagagaaaacaggcttttgaagaattgcgagatgatttggttgagttaagtaaagccaaatattcgagaaatattgttaagaaatttctcatgtatggaagtaaaccacagattgcagagataatcagaagttttaaaggccacgtgaggaagatgctgcggcatgcggaagcatcagccatcgtggagtacgcatacaatgacaaagccattttggagcagaggaacatgctgacggaagagctctatgggaacacatttcagctttacaagtcagcagatcacccaactctggacaaagtgttagagttacagccagaaaaattagaacttattatggatgaaatgaaacagattctaactccaatggcccaaaaggaagctgtgattaagcactcattggtgcataaagtattcttggacttttttacctatgcaccccccaaactcagatcagaaatgattgaagccatccgcgaagcggtggtctacctggcacacacacacgatggcgccagagtggccatgcactgcctgtggcatggcacgcccaaggacaggaaagtgattgtgaaaacaatgaagacttatgttgaaaaggtggctaatggccaatactcccatttggttttactggcggcatttgattgtattgatgatactaagcttgtgaagcagataatcatatcagaaattatcagttcattgcctagcatagtaaatgacaaatatggaaggaaggtcctattgtacttactaagccccagagatcctgcacatacagtacgagaaatcattgaagttctgcaaaaaggagatggaaatgcacacagtaagaaagatacagaggtccgcagacgggagctcctagaatccatttctccagctttgttaagctacctgcaagaacacgcccaagaagtggtgctagataagtctgcgtgtgtgttggtgtctgacattctgggatctgccactggagacgttcagcctaccatgaatgccatcgccagcttggcagcaacaggactgcatcctggtggcaaggacggagagcttcacattgcagaacatcctgcaggacatctagttctgaagtggttaatagagcaagataaaaagatgaaagaaaatgggagagaaggttgttttgcaaaaacacttgtagagcatgttggtatgaagaacctgaagtcctgggctagtgtaaatcgaggtgccattattctttctagcctcctccagagttgtgacctggaagttgcaaacaaagtcaaagctgcactgaaaagcttgattcctacattggaaaaaaccaaaagcaccagcaaaggaatagaaattctacttgaaaaactgagcacataggtggaaagagttaagagcaagatggaatgattttttctgttctctgttctgtttcccaatgcagaaaagaaggggtagggtccaccatactggtaattggggtactctgtatatgtgtttcttctttgtatacgaatctatttatataaattgtttttttaaatggtcttttttaaaaaaaaaaaaaaaaaaaaaaaaaaaaaaaaaaaaaaaaaaaaaaaaaaaaaaaaaaaaaaaaaaaaaaaaaaaaaaaaaaaaaaa

SEQ ID NO: 121 - DNA, 260 bp, Artificial Sequence
  Description of Artificial sequences:primer
  misc_feature (1)..(260): 3' terminal sequence from clone image:129757. gata binding protein 3(GATA3) gene.
tcacagcactagagaccctgttaaataggggatatgagtcagaatggcttattcacagatggggtccagattcagtggttggaacacagacaccacagtgagctcctttgcaaagtggcaaacataattttgctttctgccttcaaaaacatatatccatcgcgtttaggcttcatgatactgctcctgcaaaaatgcaagtcgaaagggactgcagggactctcgctggggggccctgtgagcatcgagcagggctctt

SEQ ID NO: 122 - DNA, 2365 bp, Artificial Sequence
  Description of Artificial sequences:primer
  misc_feature (1)..(2365): gata binding protein 3(GATA3) gene.
tcccagccttcccatccccccaccgaaagcaaatcattcaacgacccccgaccctccgacggcaggagccccccgacctcccaggcggaccgcccttccctccccgcgcgggttccgggcccggcgagagggcgcgacgacagccgaggccatggaggtgacggcggaccagccgcgctgggtgagccaccaccaccccgccgtgctcaacgggcagcacccggacacgcaccacccgggcctcagccactcctacatggacgcggcgcagtacccgctgccggaggaggtggatgtgctttttaacatcgacggtcaaggcaaccacgtcccgccctactacggaaactcggtcagggccacggtgcagaggtaccctccgacccaccacgggagccaggtgtgccgcccgcctctgcttcatggatccctaccctggctggacggcggcaaagccctgggcagccaccacaccgcctccccctggaatctcagccccttctccaagacgtccatccaccacggctccccggggcccctctccgtctaccccccggcctcgtcctcctccttgtcggggggccacgccagcccgcacctcttcaccttcccgcccaccccgccgaaggacgtctccccggacccatcgctgtccaccccaggctcggccggctcggcccggcaggacgagaaagagtgcctcaagtaccaggtgcccctgcccgacagcatgaagctggagtcgtcccactcccgtggcagcatgaccgccctgggtggagcctcctcgtcgacccaccaccccatcaccacctacccgccctacgtgcccgagtacagctccggactcttcccccccagcagcctgctgggcggctcccccaccggcttcggatgcaagtccaggcccaaggcccggtccagcacaggcagggagtgtgtgaactgtggggcaacctcgaccccactgtggcggcgagatggcacgggacactacctgtgcaacgcctgcgggctctatcacaaaatgaacggacagaaccggcccctcattaagcccaagcgaaggctgtctgcagccaggagagcagggacgtcctgtgcgaactgtcagaccaccacaaccacactctggaggaggaatgccaatggggaccctgtctgcaatgcctgtgggctctactacaagcttcacaatattaacagacccctgactatgaagaaggaaggcatccagaccagaaaccgaaaaatgtctagcaaatccaaaaagtgcaaaaaagtgcatgactcactggaggacttccccaagaacagctcgtttaacccggccgccctctccagacacatgtcctccctgagccacatctcgcccttcagccactccagccacatgctgaccacgcccacgccgatgcacccgccatccagcctgtcctttggaccacaccacccctccagcatggtcaccgccatgggttagagccctgctcgatgctcacagggcccccagcgagagtccctgcagtccctttcgacttgcatttttgcaggagcagtatcatgaagcctaaacgcgatggatatatgtttttgaaggcagaaagcaaaattatgtttgccactttgcaaaggagctcactgtggtgtctgtgttccaaccactgaatctggaccccatctgtgaataagccattctgactcatatcccctatttaacagggtctctagtgctgtgaaaaaaaaaaatcctgaacattgcatataacttatattgtaagaaatactgtacaatgactttattgcatctgggtagctgtaaggcatgaaggatgccaagaagtttaaggaatatgggagaaatagtgtggaaattaagaagaaactaggtctgatattcaaatggacaaactgccagttttgtttcctttcactggccacagttgtttgatgcattaaaagaaaataaaaaaaagaaaaaagagaaaagaaaaaaaaagaaaaaagttgtaggcgaatcatttgttcaaagctgttggccctctgcaaaggaaataccagttctgggcaatcagtgttaccgttcaccagttgccattgagggtttcagagagcctttttctaggcctacatgctttgtgaacaagtccctgtaattgttgtttgtatgtataattcaaagcaccaaaataagaaaagatgtagatttatttcatcatattatacagaccgaactgttgtataaatttatttactgctagtcttaagaactgctttctttcgtttgtttgtttcaatattttccttctctctcaattttcggttgaataaactagattacattcagttggcaaaaaaaaaaaaa

SEQ ID NO: 123 - DNA, 357 bp, Artificial Sequence
  Description of Artificial sequences:primer
  misc_feature (1)..(357): 3' terminal sequence from clone image:129865. serine/threonine kinase 6(STK6) gene.
  misc_feature (6)..(6): n is a, c, g, or t
  misc_feature (179)..(179): n is a, c, g, or t
  misc_feature (340)..(340): n is a, c, g, or t
ttttcngtacatatatctttattttcatacttaaaaagaatcacatactcattccaacagctttaccaggcttcgcaacccaataagttacacactcactcaggtactaggaaggttattgcacagctccttaactgatcggggtcagggcagagtggtcactttccccacagccaggntctggatttgcctcctgtgaagacaccatgcctagcacaggctgacggggcggctgcagtcgaaccttgcctccagattattgaaccagtataagtaggcacaattctcgtgggctactttcacttcagagtgtcatgtttatttgatgtgggagcttttntgaatgggggagggtta

SEQ ID NO: 124 - DNA, 2253 bp, Artificial Sequence
  Description of Artificial sequences:primer
  misc_feature (1)..(2253): serine/threonine kinase 6(STK6) gene.
ggaagacttgggtccttgggtcgcaggtgggagccgacgggtgggtagaccgtgggggatatctcagtggcggacgaggacggcggggacaaggggcggctggtcggagtggcggagcgtcaagtcccctgtcggttcctccgtccctgagtgtccttggcgctgccttgtgcccgcccagcgcctttgcatccgctcctgggcaccgaggcgccctgtaggatactgcttgttacttattacagctagaggcatcatggaccgatctaaagaaaactgcatttcaggacctgttaaggctacagctccagttggaggtccaaaacgtgttctcgtgactcagcaaattccttgtcagaatccattacctgtaaatagtggccaggctcagcgggtcttgtgtccttcaaattcttcccagcgcgttcctttgcaagcacaaaagcttgtctccagtcacaagccggttcagaatcagaagcagaagcaattgcaggcaaccagtgtacctcatcctgtctccaggccactgaataacacccaaaagagcaagcagcccctgccatcggcacctgaaaataatcctgaggaggaactggcatcaaaacagaaaaatgaagaatcaaaaaagaggcagtgggctttggaagactttgaaattggtcgccctctgggtaaaggaaagtttggtaatgtttatttggcaagagaaaagcaaagcaagtttattctggctcttaaagtgttatttaaagctcagctggagaaagccggagtggagcatcagctcagaagagaagtagaaatacagtcccaccttcggcatcctaatattcttagactgtatggttatttccatgatgctaccagagtctacctaattctggaatatgcaccacttggaacagtttatagagaacttcagaaactttcaaagtttgatgagcagagaactgctacttatataacagaattggcaaatgccctgtcttactgtcattcgaagagagttattcatagagacattaagccagagaacttacttcttggatcagctggagagcttaaaattgcagattttgggtggtcagtacatgctccatcttccaggaggaccactctctgtggcaccctggactacctgccccctgaaatgattgaaggtcggatgcatgatgagaaggtggatctctggagccttggagttctttgctatgaatttttagttgggaagcctccttttgaggcaaacacataccaagagacctacaaaagaatatcacgggttgaattcacattccctgactttgtaacagagggagccagggacctcatttcaagactgttgaagcataatcccagccagaggccaatgctcagagaagtacttgaacacccctggatcacagcaaattcatcaaaaccatcaaattgccaaaacaaagaatcagctagcaaacagtcttaggaatcgtgcagggggagaaatccttgagccagggctgccatataacctgacaggaacatgctactgaagtttattttaccattgactgctgccctcaatctagaacgctacacaagaaatatttgttttactcagcaggtgtgccttaacctccctattcagaaagctccacatcaataaacatgacactctgaagtgaaagtagccacgagaattgtgctacttatactggttcataatctggaggcaaggttcgactgcagccgccccgtcagcctgtgctaggcatggtgtcttcacaggaggcaaatccagagcctggctgtggggaaagtgaccactctgccctgaccccgatcagttaaggagctgtgcaataaccttcctagtacctgagtgagtgtgtaacttattgggttggcgaagcctggtaaagctgttggaatgagtatgtgattctttttaagtatgaaaataaagatatatgtacagacttgtattttttctctggtggcattcctttaggaatgctgtgtgtctgtccggcaccccggtaggcctgattgggtttctagtcctccttaaccacttatctcccatatgagagtgtgaaaaataggaacacgtgctctacctccatttagggatttgcttgggatacagaagaggccatgtgtctcagagctgttaagggcttatttttttaaaacattggagtcatagcatgtgtgtaaactttaaatatgcaaataaataagtatctatgtctaaaaaaaaaaaaaaaa

SEQ ID NO: 125 - DNA, 310 bp, Artificial Sequence
  Description of Artificial sequences:primer
  misc_feature (1)..(310): 3' terminal sequence from clone image:130173. hypothetical protein flj14297(FLJ14297) gene.
  misc_feature (12)..(12): n is a, c, g, or t
  misc_feature (14)..(14): n is a, c, g, or t
  misc_feature (236)..(236): n is a, c, g, or t
aacacaataacngnttttatttcaaaaattaagttcacacattatcttaagagaattttaaaatttactgcattttattgcacttattacataaatatacagttggcaaaacaatttactactaaaattcagattctctctcagtataacgcaaagtattactctgaacacctacttcaggcatcactcagtaaggtcaaccactaaaagcctctctgctcaggattttcctgggngcatcttttatttctcttctctttcatgtgggaggtctatggaataatgccccaccctaatggcaaggggaatt

SEQ ID NO: 126 - DNA, 328 bp, Artificial Sequence
  Description of Artificial sequences:primer
  misc_feature (1)..(328): 5' terminal sequence from clone image:130173. hypothetical protein flj14297(FLJ14297) gene.
  misc_feature (32)..(32): n is a, c, g, or t
gcttgaacccaggaggtggaggttgcggtgantgagatcgtgccattgcactccagcctgggtaacaagagtgaaactctgtctcaaaacaagaaaaaaagaaaagaaacaccagagaatttttactagaatataatttgtaggtgcagtaaatgtgaagaaatatttaggctaaaattaagactatgtaaacatcagaggatttacagtaggaaagaactaaggaactaacacttcagacttttaaaataaatcagagtatttaagtattaacaaaagttggaacctgtttaggaaatttcccttgtattttaagtttgaaaagttt

SEQ ID NO: 127 - DNA, 1815 bp, Artificial Sequence
  Description of Artificial sequences:primer
  misc_feature (1)..(1815): hypothetical protein flj14297(FLJ14297) gene.
gagctcggttagggcctcacttccctgcttccacacctcagggaggcctcggtgattttgccagagcctcagcctccatcgctctgtaacctgcgggtattggatgattcgtagctaagacttcgcgacacccttgaagctgagaaatggaacccttaacattcagggatgtggccatagaattctctccagaagagtggaaatgcctggaccctgcccagcagaatttgtatagagatgtgatgttggagaactacagaaacctggtctccctaggtgtctggaaatgaagtatggaaatgaaatcatgaataaagacccagttttcagaatctctccacgaagtagaggaactcataccaatccagaagagcctgaagaagatgttcaagctgaaagagtccaagcagcaaatgcactcactactccaaacttggaggaggaaccagtcataactgcaagctgtttacacaaggaatattatgagacaaagaaagttgcttttcaacaacaaggaagaaagcagccatcagaaatgtttcgttttgtgttaaaaagtgaagttttgggattactaggacacaatggagctggcaaaagtacttccattaaaatgataactgggtgcacagtgccaactgcaggagtggtggtgttacaaggcaacagagcatcagtaaggcaacagcgtgacaacagcctcaagttcttgggtactgccctcaggagaactcactgtgtcccaaacttacaatgaaagagcatttggagttgtatgcagccgtgaaaggactgggcaaagatgctgctcttagtatttcatgattggtggaagctctcaagctccaggagcaacttaaggctcccgtgaaaactctatcagagggaataaagagaaagctatgcttcgtgctgagcatactggggaacccatcagtggtgcttctagacgagctgttcaccgggatggaccctgaggggcagcagcaaatgtggcagatacttcaggctaccattaaaaaccaggagaggggcgccctcttgaccacccattacatgtcagaggctaagtctctgtgtgaccgtgtggccatcatggtgtcaggaacgctaaggtgtattggttccattcaacagctgaaaagtttggtaaagattatttactagaaataaaaatgaaagaacctactcaggtggaagctctccacacagagattttgaagcttttcccacaggctgcttggcaggaaagatattcctctttaatggcatgtaagttacctgtggaggatgtccaccctctgtctcaggcctttttcaaattaaaggcagtgaaacagaccttcaacctggaggaatacagcctctctcaggctaccttggagcaggtgttcttagaactctgtaaagagcaggcgctgggaaatgttgatgataaaattgatataacagttcgatggaaacttctcccacgggaagattcttaaaacgaagaacctcctaacattcaattttaagtcctactgcattattagtttccataattctacaagaatgtttccttttacttcagttaacaaaagaaaatattcaatagtttaaacatgcaacaatgattaaagttttcatttttaaaaattttaggatgaaggaaacaaggaaatatagggaaaagtagcagacaaaattaacaaactcagacatgttattcatccccaacatgggtctattttgtgcttaaaaataattttaaaatcataaaatattaggtttgtttttggttattatcaataaagttaacactgagcacatttt

SEQ ID NO: 128 - DNA, 383 bp, Artificial Sequence
  Description of Artificial sequences:primer
  misc_feature (1)..(383): 3' terminal sequence from clone image:132307. hairy/enhancer-of-split related with yrpw motif-like(HEYL) gene.
  misc_feature (9)..(9): n is a, c, g, or t
  misc_feature (95)..(95): n is a, c, g, or t
  misc_feature (155)..(155): n is a, c, g, or t
  misc_feature (188)..(188): n is a, c, g, or t
  misc_feature (308)..(308): n is a, c, g, or t
  misc_feature (334)..(334): n is a, c, g, or t
  misc_feature (352)..(352): n is a, c, g, or t
  misc_feature (365)..(365): n is a, c, g, or t
tttttagantagaagtagaatctactggaagtttccagaagcactaaaaaaatctttattggatgtccgcaacaacccatgcaatggggtagganttggagacaccaggaaggcttggggatagaaacacaagatgcaagtccttgaccacagantcagatcacacagtcacctttccttccacaatntcccagggacaatgaaagcaagttcaaccaagatgctgaaagagctggtgcattcccatctcatttcagtgggcatcacagattctttgggagttgcatgcttgcaacgtgggaaatgtntttcccacagccccactagggggttntcagggctagggaagttnccaaactggcaanactacatcactgacctgg

SEQ ID NO: 129 - DNA, 363 bp, Artificial Sequence
  Description of Artificial sequences:primer
  misc_feature (1)..(363): 5' terminal sequence from clone image:132307. hairy/enhancer-of-split related with yrpw motif-like(HEYL) gene.
  misc_feature (75)..(75): n is a, c, g, or t
  misc_feature (95)..(95): n is a, c, g, or t
  misc_feature (136)..(136): n is a, c, g, or t
  misc_feature (249)..(249): n is a, c, g, or t
  misc_feature (273)..(273): n is a, c, g, or t
  misc_feature (299)..(299): n is a, c, g, or t
  misc_feature (323)..(323): n is a, c, g, or t
  misc_feature (354)..(354): n is a, c, g, or t
cccatctgagatgtgcagtagcaaggagaggggggatcattttagagagtgggtcattggcagggagtgctccgnaggaggcagaggggagactntggtagaaggaagacagaactcacacatgctcccaggattngggacagggacagaggaggtaacagaaggcaaaggccagtttccccgttatcatgaaggggcccactcaggacaggaacaaggacaactcctcctcctcctcctcctctcctngcttgctcctggggataccaggtncagttgatgttagtctttgcagtttnggcaactttccttagccttgagantcccttagttgggggcttttggggaaacacnttttccacg

SEQ ID NO: 130 - DNA, 3416 bp, Artificial Sequence
  Description of Artificial sequences:primer
  misc_feature (1)..(3416): hairy/enhancer-of-split related with yrpw motif-like(HEYL) gene.
accaggcagcctgcgttcgccatgaagcgacccaaggagccgagcggctccgacggggagtccgacggacccatcgacgtgggccaagagggccagctgagccagatggccaggccgctgtccacccccagctcttcgcagatgcaagccaggaagaaacgcagagggatcatagagaaacggcgtcgagaccgcatcaacagtagcctttctgaattgcgacgcttggtccccactgcctttgagaaacagggctcttccaagctggagaaagccgaggtcttgcagatgacggtggatcacttgaaaatgctccatgccactggtgggacaggattctttgatgcccgagccctggcagttgacttccggagcattggttttcgggagtgcctcactgaggtcatcaggtacctgggggtccttgaagggcccagcagccgtgcagaccccgtccggattcgccttctctcccacctcaacagctacgcagccgagatggagccttcgcccacgcccactggccctttggccttccctgcctggccctggtctttcttccatagctgtccagggctgccagccctgagcaaccagctcgccatcctgggaagagtgcccagccctgtcctccccggtgtctcctctcctgcttaccccatcccagccctccgaaccgctccccttcgcagagccacaggcatcatcctgccagcccggaggaatgtgctgcccagtcgaggggcatcttccacccggagggcccgccccctagagaggccagcgacccctgtgcctgtcgcccccagcagcagggctgccaggagcagccacatcgctcccctcctgcagtcttcctccccaacaccccctggtcctacagggtcggctgcttacgtggctgttcccacccccaactcatcctccccagggccagctgggaggccagcgggagccatgctctaccactcctgggtctctgaaatcactgaaatcggggctttctgagctgccccttcaccaccccgccccaaggaataaggaaggttcttttaccaggagcccaaaaaagggcactgccttttctgctttgcttcgtggactggctcatatgtgaaggcacgttctccagccatcagaggccccctcctcctccaacccatctctccttctcactgttatcccagcttatccacccagctctcctggagctgttctggtctcagaggcttggttccatttctcacctgaacagatgagtcctgggagagaccctcagagatccgcccagacccctctcctgccctctgcacaccagcagcaggcatgaaccttgggtctgggaaaaagctttaacctgcagggcaccaggacccaaggcaggctgttccttggggcggtcagaccccagtcaggagcaatgactgactggctgcagccttcccacgccaagaggctggaacatagtgtctgcctcgcttcctggagatagtaactgagcaggggctacaaagaggtctcctgggaaccctgtctgccccttcccacctgtccttgggccacaccatcacactgaaccacaggacagaccctttctccaccacagccaaggcctggagactgggggcccagcagagcctgctcccaccctcctcccagcagcagacacccaccctctcactgactaacaggtccctgcacacagctggcctggtaaacccagctgggaggtttctaggcagcagcaaaactctgtgacagggtgtcctcacaccaggccttggacagctctcccagacaggagccagggttgagcaatggagagcccagcccccacgtcttacagtcgccatcctccaggcgtgtggtccctccccattgggtgcacagtgcagaggggccgtggccccatgtgatggtgcgcagagaggaacctcttgggattcagcaccagacgtctgtgctgcctggtttgcatccggctcacagagcccagactgctggaacagccaaggactgtcaggctggacaaaaataactgcaaggaggggcaagagaaaggatgattcgaggcaccttggcccttcaaggtcatgcagtgggtcgagcgcctgagatcctgttcaccaggactccacagagctggctctgctcagaagccatttcattccccggctccaccctaggccactttttctaacagaggaaacaaatggtccagcagtcgttcccagcagaacagcggagcctggactgacacccagtgggaccagtgttgccacaccagttgataaaatgcagaaacccttctgtactcgttggtaaatatctactcccccaagtgactccaggtgccccccaccgcctggcacttcccccaggactcctacgatctggttactgcctggccgatccaaggctgtggagtcccagagccagcagttcactggtgctcattccacactggttagatacttcagttgtcacccctgggaagattctcccacctcctccctttgatggaaccaccctccccagaggctgcattgaggagactccacagactgaaaagtgagtttgcagaaaccttggggaaaagggccctttcaaagaagtggataagagggaggagatcattgagtgacccagaaagctcttttgaaaagacagactcctcaaggagagataaagaggaaagcacctctttcattttttagtgtgagctaattccatcagactgctgtcctcctggacccatctgagatgtgcagtagcaaggagaggggggatcattttagagagtgggtcattggcagggagtgctccggagggaggcagaggggagactgtggtagaaggaagacagaactcacacatgctcccaggattggggacagggacagaggaggtaacagaaggcaaaggccagtttccccgttatcatgaaggggcccactcaggacaggaacaaggacaactcctcctcctcctcctcctctcctgctgctcctgggataccaggtcagtgatgtagtcttgcagtttggcaacttcctagcctgagaatccctagtggggctgtgggaaacacatttccacgttgcaagcatgcaactccaaagaatctgtgatgccactgaaatgagatgggaatgatccagctctttcagcatcttggttgaacttgctttcattgtccctgggatattgtggaaggaaaggtgactgtgtgatctgattctgtggtcaaggacttgcatcttgtgtttctatccccaagccttcctggtgtctccaactcctaccccattgcatgggttgttgcggacatccaataaagatttttttagtgcttctggaaaaaaaaaaaaaaaaaaaaaaaaaaaaaaaaaaaaaaaaaaaaaaaaaaaaaaacc

SEQ ID NO: 131 - DNA, 517 bp, Artificial Sequence
  Description of Artificial sequences:primer
  misc_feature (1)..(517): 3' terminal sequence from clone image:1326652. cd2 antigen (p50), sheep red blood cell receptor(CD2) gene.
ctagtcaaagcttttatttcacttttactcacaggatggtgggcaagtgtccaccagggcacataagaaactccagagtctcttaagcagataggctgcttgtagtgagacccaggcacaccaatcacttgatttatcgcatctacacatgacctgagaggggacaagaaatctctaagatttctgtgctcggtcctctaccattcttgcaatcacacttatattgcttctccttactggtgtgatggagctctctgaggagaccaaaaactccagatgttgaccacatggctgagttcgaagatgcagaggtggctgtggccacagcatcaggaggtgacaatgttctggacacagaaaacacctgcatggaggtacggatatgcacatcaggagggcagaaatccacagtgctttgtattgagaaagacagtgtctatcttttttaattagaggaaggggaaatgagttgctggtgaacaatgggagggtgttggattaatcgaggtatggggag

SEQ ID NO: 132 - DNA, 1579 bp, Artificial Sequence
  Description of Artificial sequences:primer
  misc_feature (1)..(1579): cd2 antigen (p50), sheep red blood cell receptor(CD2) gene.
accaacccctaagatgagctttccatgtaaatttgtagccagcttccttctgattttcaatgtttcttccaaaggtgcagtctccaaagagattacgaatgccttggaaacctggggtgccttgggtcaggacatcaacttggacattcctagttttcaaatgagtgatgatattgacgatataaaatgggaaaaaacttcagacaagaaaaagattgcacaattcagaaaagagaaagagactttcaaggaaaaagatacatataagctatttaaaaatggaactctgaaaattaagcatctgaagaccgatgatcaggatatctacaaggtatcaatatatgatacaaaaggaaaaaatgtgttggaaaaaatatttgatttgaagattcaagagagggtctcaaaaccaaagatctcctggacttgtatcaacacaaccctgacctgtgaggtaatgaatggaactgaccccgaattaaacctgtatcaagatgggaaacatctaaaactttctcagagggtcatcacacacaagtggaccaccagcctgagtgcaaaattcaagtgcacagcagggaacaaagtcagcaaggaatccagtgtcgagcctgtcagctgtccagagaaaggtctggacatctatctcatcattggcatatgtggaggaggcagcctcttgatggtctttgtggcactgctcgttttctatatcaccaaaaggaaaaaacagaggagtcggagaaatgatgaggagctggagacaagagcccacagagtagctactgaagaaaggggccggaagccccaacaaattccagcttcaacccctcagaatccagcaacttcccaacatcctcctccaccacctggtcatcgttcccaggcacctagtcatcgtcccccgcctcctggacaccgtgttcagcaccagcctcagaagaggcctcctgctccgtcgggcacacaagttcaccagcagaaaggcccgcccctccccagacctcgagttcagccaaaacctccccatggggcagcagaaaactcattgtccccttcctctaattaaaaaagatagaaactgtctttttcaataaaaagcactgtggatttctgccctcctgatgtgcatatccgtacttccatgaggtgttttctgtgtgcagaacattgtcacctcctgaggctgtgggccacagccacctctgcatcttcgaactcagccatgtggtcaacatctggagtttttggtctcctcagagagctccatcacaccagtaaggagaagcaatataagtgtgattgcaagaatggtagaggaccgagcacagaaatcttagagatttcttgtcccctctcaggtcatgtgtagatgcgataaatcaagtgattggtgtgcctgggtctcactacaagcagcctatctgcttaagagactctggagtttcttatgtgccctggtggacacttgcccaccatcctgtgagtaaaagtgaaataaaagctttgactagaaaaaaaaaaaaaaaaaaaaaaaaaaaaaaaaaaaaaaaaaaaaaaaaaaaaaaaaaaaaaaaaa

SEQ ID NO: 133 - DNA, 454 bp, Artificial Sequence
  Description of Artificial sequences:primer
  misc_feature (1)..(454): 3' terminal sequence from clone image:133334. guanine nucleotide-releasing factor 2 (specific for crk proto-oncogene)(GRF2) gene.
  misc_feature (226)..(226): n is a, c, g, or t
  misc_feature (244)..(244): n is a, c, g, or t
  misc_feature (323)..(323): n is a, c, g, or t
  misc_feature (354)..(354): n is a, c, g, or t
  misc_feature (360)..(360): n is a, c, g, or t
  misc_feature (401)..(401): n is a, c, g, or t
  misc_feature (439)..(439): n is a, c, g, or t
gctttctatatttttcctttgttctgtttgaactgggctaagtaagcacagttagaccctgctgttcacttgaccacgtcctaaacccgggacaagtgagcactcattcatgcacagcagacccggagcatgggctggggcagcacaactgggttcccgcagcgccctgcctgcaggctcatgctggaggccacggaaccaggcggcacagggcagattctgtttntcaagcgccccacaagcnttgcccagattgtcaagctcagcagcgagaatggttttgacgaggaggatgggaaacagcatctgctctgggaagccgntctggcctgggggagagttggggagagggtncgcttnctgcagctgctgccttagggaggctcctctttggccagggnttctgcctccctgcaccctgagggaccatttcgggttnctcaaggatgcactt

SEQ ID NO: 134 - DNA, 4070 bp, Artificial Sequence
  Description of Artificial sequences:primer
  misc_feature (1)..(4070): guanine nucleotide-releasing factor 2 (specific for crk proto-oncogene)(GRF2) gene.
gaattcccttttctgggcaccgccttctgctagggggttgtagatgaaagtgcctgctcccagagaagcttgtctaacctagcacagtttctaagctacccaggctgccagaccgagcgaccgtgctgccatggacacagactctcagcgttctcatctctcttccttcaccatgaagctgatggacaaattccactcacccaaaatcaagagaacgccatcaaagaagggaaaaccagctgaggtgtccgtaaagattccagagaagcctgtgaacaaagaggcaacagacagatttctaccagagggctaccctctccccttggatctggagcagcaggcagtagaatttatgtccaccagtgctgtggcttccaggtctcaaaggcagaagaacctgagctggctggaggagaaagagaaggaagttgtcagtgccctgcgctactttaagaccattgtggacaaaatggcaattgataagaaggtactggagatgcttccagggtcagccagcaaggtgctggaggccatcttacccctggtgcagaacgatcctcgaattcagcacagctcagccctctcttcctgctatagccgagtgtaccaaagcctcgccaacctcattcgctggtctgaccaagtgatgctggaaggcgtgaactcagaagacaaggagatggtgacgactgtgaagggggtcatcaaggctgtgctggatggagtgaaggagctggtcaggctcaccatcgagaagcagggacgtccgtctccgacgagccccgtgaagcccagttcccctgccagcaagcctgatggcccagcagagctccccctgacagaccgcgaggtagagatcctaaacaagacgactgggatgtcacagtcaactgagctcctcccagatgccacggatgaagaggtcgcgccccccaagcctcctctgcctggcattcgggtggttgataatagtcctccaccagcattgacacccaagaaaagacagtcggcgccgtcccctacccgagtggctgtggtggcccccatgagccgagccaccagtggctccagtttgcctgttggaatcaataggcaggattttgatgttgactgttacgcacagaggcgactgtcaggaggcagccactcatatggtggagagtcgccccgcctctccccctgcagcagcatagacaagctcagcaagtcagacgagcagctgtcctctctggacagggacagtgggcagtgctcccggaacacaagctgtgaaacactagaccactatgatcccgactatgaattcctccagcaagacctctctaacgcagaccagatacctcagcagacggcctggaaccttagcccgttgccagagtctttgggggagtctgggtctccatttcttggccctcctttccagctgcctcttggcggccatccccagccagacggacctctggccccagggcagcagacagatacgccacctgctctccccgagaagaagcgcaggagcgcagcctcccagacggcggacggctctggctgcagggtgtcctacgagcggcatccctcgcagtatgacaacatctctggggaggacctgcagagcacagccccgatcccatccgtcccctacgcgccctttgctgctattctgccctttcagcatggaggttcctcagcccctgtcgaatttgtgggtgattttactgctcctgagtcaaccggtgacccagaaaaaccacctcctctaccagagaagaaaaacaaacacatgctggcctacatgcagttgctggaggactactcggagccgcagccctctatgttctaccagacgccacagaacgagcacatctaccagcagaagaacaagctcctcatggaggtatacggcttcagcgactccttcagtggggtggactccgtgcaggagctggccccgccgcccgccctaccccccaagcagcggcagctggagccaccggctgggaaagacggacatcccagagatccctcagcggtcagcggcgtccctgggaaggacagcagagacggcagtgagagggccccaaagtcaccagatgctctggagtcggctcagtcggaggaggaagtggacgagctgtccctcattgaccacaacgaaattatgtccaggctgacgctcaagcaggagggtgatgacgggccggacgtccgcggaggatctggggacatcttactggtccatgctactgagactgacaggaaagatttggtgttgtactgcgaggcattcctgaccacctacaggaccttcatctccccagaggagctcatcaagaagctgcagtacagatatgagaaattctctccctttgccgacacattcaagaagcgcgtcagcaagaacacgttcttcgtgctggtacgggtggtggatgagctctgcctggtggagttgacagaagagatcctgaagctgctgatggaactggtcttccgcctggtgtgcaatggggagctgagcctggcccgtgtgctccggaagaacatcctggacaaggtggaccagaagaagctactcaggtgtgccacctccagccagcccctggcagcccggggggtagcagccaggccggggaccttgcacgactttcacagccatgagatagcggagcagctaacgctgctggatgctgagctcttctataaaatagagattcctgaggttttgctttgggcaaaagagcagaatgaggagaagagccccaacttgacccagttcacggagcacttcaacaacatgtcctactgggtccggtccataatcatgttacaggaaaaggcccaggacagggaacggctgctcttgaagttcatcaagatcatgaagcacttgcggaagctgaataacttcaactcctacttggccatcctctctgccctggactcggcgcccatccgcaggctggagtggcagaagcagacttcagagggcctggccgagtactgcacactgatcgacagctcgtcctccttccgagcctaccgggccgccctctcggaggtggaaccgccgtgcatcccgtacctggggctgatcctgcaggacctgaccttcgttcacctgggaaacccagactacatcgacgggaaagtgaacttctccaagcggtggcagcagttcaacatcctcgacagcatgcgctgcttccagcaggcgcactatgacatgcggaggaacgacgacattataaacttcttcaatgacttcagtgaccacctggctgaggaggccctatgggaactgtctctgaaaattaaacccaggaacataacaaggagaaaaacagaccgggaagagaagacctaggagcagacgccgggatccaggagaatgctcgaggggcgcagagggcagctcccagaccggagaggaccttggacctgttaggcgcatggcaggagtcccggcctcggagccatgaggctggccagccctcagcggggccgggcgggagctggagcctgccagccgcttcctgcctccttcctctgtgggagcagacccgtgggcctcagggcagccagcaggcaggtcttgttgccaatttacaaaccggtggttttctggtttggttttgttttctgcttttacttccatctctcccctcttgaccttccacccactcccctccagggagagagcagcagagacctcatcagcagaccaaggaagtggtgggtgctccccctccctaagctccagggtccctgaatcttctgaaatctcaaatgagtggaggcctcctggggtggcctgtcctgcaggggccctggaatgggggcaagcagctgggtgggcagaatgcagagtagactcgggggaggatcctttcactttccgcttccccttctgatgcatggaggatggtgtgagcttttcagcaggcccggaaaggtacgcaggtgacgccttagcagccccgcagctggtgctctgccccgcggtactggcgccatcagggcctcccttgcccgcctgagagcagcagcagtctctgtcatcccgtcgcccc

SEQ ID NO: 135 - DNA, 637 bp, Artificial Sequence
  Description of Artificial sequences:primer
  misc_feature (1)..(637): 3' terminal sequence from clone image:1338831. integrin, alpha l (antigen cd11a (p180), lymphocyte function-associated antigen 1, alpha polypeptide)(ITGAL) gene.
tttttttttttttttttttttttttttttttttggacagaatttcacatttattggataaatacatgcaggcactgtgcttggcactggggctccaagttagcagacgtggttcccaccttgagctcagtctttctgtgggggccactgcacaggcgtgatgggtcctgggagagggtgtggagctagggcagggcagagcctgagaagacagcctccaagggtggggatgtcacgggcccgtgcccgctttttatttttattttttccttgagacggatctcgctgtgttgcccaggctggagtgcaatggcgcaatcttggctcactgcaacctccacctcccaggttcaagcaattctcctacctcaacctcctgagtagctgggactacaggtgtgtgccacacgcctggattttgtatttttagtagagatggggtttcgccaggctggcctctaactcctgacctcaggtgatccacctccttggcctcccaaagtgctgggattaaggcgtgacccacgcgcgcagccagccctcttttctgtatctcgactgctctgtcataatcagtgaatatgtcacactactaatgtccagcctgaatacatgagacatccaggtgacagacagta

SEQ ID NO: 136 - DNA, 5133 bp, Artificial Sequence
  Description of Artificial sequences:primer
  misc_feature (1)..(5133): integrin, alpha l (antigen cd11a (p180), lymphocyte function-associated antigen 1 alpha polypeptide)(ITGAL) gene.
cctctttcaccctgtctaggttgccagcaaatcccacgggcctcctgacgctgcccctggggccacaggtccctcgagtgctggaaggatgaaggattcctgcatcactgtgatggccatggcgctgctgtctgggttctttttcttcgcgccggcctcgagctacaacctggacgtgcggggcgcgcggagcttctccccaccgcgcgccgggaggcactttggataccgcgtcctgcaggtcggaaacggggtcatcgtgggagctccaggggaggggaacagcacaggaagcctctatcagtgccagtcgggcacaggacactgcctgccagtcaccctgagaggttccaactatacctccaagtacttgggaatgaccttggcaacagaccccacagatggaagcattttggcctgtgaccctgggctgtctcgaacgtgtgaccagaacacctatctgagtggcctgtgttacctcttccgccagaatctgcagggtcccatgctgcaggggcgccctggttttcaggaatgtatcaagggcaacgtagacctggtatttctgtttgatggttcgatgagcttgcagccagatgaatttcagaaaattctggacttcatgaaggatgtgatgaagaaactcagcaacacttcgtaccagtttgctgctgttcagttttccacaagctacaaaacagaatttgatttctcagattatgttaaatggaaggaccctgatgctctgctgaagcatgtaaagcacatgttgctgttgaccaatacctttggtgccatcaattatgtcgcgacagaggtgttccgggaggagctgggggcccggccagatgccaccaaagtgcttatcatcatcacggatggggaggccactgacagtggcaacatcgatgcggccaaagacatcatccgctacatcatcgggattggaaagcattttcagaccaaggagagtcaggagaccctccacaaatttgcatcaaaacccgcgagcgagtttgtgaaaattctggacacatttgagaagctgaaagatctattcactgagctgcagaagaagatctatgtcattgagggcacaagcaaacaggacctgacttccttcaacatggagctgtcctccagcggcatcagtgctgacctcagcaggggccatgcagtcgtgggggcagtaggagccaaggactgggctgggggctttcttgacctgaaggcagacctgcaggatgacacatttattgggaatgaaccattgacaccagaagtgagagcaggctatttgggttacaccgtgacctggctgccctcccggcaaaagacttcgttgctggcctcgggagcccctcgataccagcacatgggccgagtgctgctgttccaagagccacagggcggaggacactggagccaggtccagacaatccatgggacccagattggctcttatttcggtggggagctgtgtggcgtcgacgtggaccaagatggggagacagagctgctgctgattggtgccccactgttctatggggagcagagaggaggccgggtgtttatctaccagagaagacagttggggtttgaagaagtctcagagctgcagggggaccccggctacccactcgggcggtttggagaagccatcactgctctgacagacatcaacggcgatgggctggtagacgtggctgtgggggcccctctggaggagcagggggctgtgtacatcttcaatgggaggcacggggggcttagtccccagccaagtcagcggatagaagggacccaagtgctctcaggaattcagtggtttggacgctccatccatggggtgaaggaccttgaaggggatggcttggcagatgtggctgtgggggctgagagccagatgatcgtgctgagctcccggcccgtggtggatatggtcaccctgatgtccttctctccagctgagatcccagtgcatgaagtggagtgctcctattcaaccagtaacaagatgaaagaaggagttaatatcacaatctgtttccagatcaagtctctctacccccagttccaaggccgcctggttgccaatctcacttacactctgcagctggatggccaccggaccagaagacgggggttgttcccaggagggagacatgaactcagaaggaatatagctgtcaccaccagcatgtcatgcactgacttctcatttcatttcccggtatgtgttcaagacctcatctcccccatcaatgtttccctgaatttctctctttgggaggaggaagggacaccgagggaccaaagggcgcagggcaaggacataccgcccatcctgagaccctccctgcactcggaaacctgggagatcccttttgagaagaactgtggggaggacaagaagtgtgaggcaaacttgagagtgtccttctctcctgcaagatccagagccctgcgtctaactgcttttgccagcctctctgtggagctgagcctgagtaacttggaagaagatgcttactgggtccagctggacctgcacttccccccgggactctccttccgcaaggtggagatgctgaagccccatagccagatacctgtgagctgcgaggagcttcctgaagagtccaggcttctgtccagggcattatcttgcaatgtgagctctcccatcttcaaagcaggccactcggttgctctgcagatgatgtttaatacactggtaaacagctcctggggggactcggttgaattgcacgccaatgtgacctgtaacaatgaggactcagacctcctggaggacaactcagccactaccatcatccccatcctgtaccccatcaacatcctcatccaggaccaagaagactccacactctatgtcagtttcacccccaaaggccccaagatccaccaagtcaagcacatgtaccaggtgaggatccagccttccatccacgaccacaacatacccaccctggaggctgtggttggggtgccacagcctcccagcgaggggcccatcacacaccagtggagcgtgcagatggagcctcccgtgccctgccactatgaggatctggagaggctcccggatgcagctgagccttgtctccccggagccctgttccgctgccctgttgtcttcaggcaggagatcctcgtccaagtgatcgggactctggagctggtgggagagatcgaggcctcttccatgttcagcctctgcagctccctctccatctccttcaacagcagcaagcatttccacctctatggcagcaacgcctccctggcccaggttgtcatgaaggttgacgtggtgtatgagaagcagatgctctacctctacgtgctgagcggcatcggggggctgctgctgctgctgctcattttcatagtgctgtacaaggttggtttcttcaaacggaacctgaaggagaagatggaggctggcagaggtgtcccgaatggaatccctgcagaagactctgagcagctggcatctgggcaagaggctggggatcccggctgcctgaagcccctccatgagaaggactctgagagtggtggtggcaaggactgagtccaggcctgtgaggtgcagagtgcccagaactggactcaggatgcccagggccactctgcctctgcctgcattctgccgtgtgccctcgggcgagtcactgcctctccctggccctcagtttccctatctcgaacatggaactcattcctgaatgtctcctttgcaggctcatagggaagacctgctgagggaccagccaagagggctgcaaaagtgagggcttgtcattaccagacggttcaccagcctctcttggttccttccttggaagagaatgtctgatctaaatgtggagaaactgtagtctcaggacctagggatgttctggccctcacccctgccctgggatgtccacagatgcctccaccccccagaacctgtccttgcacactcccctgcactggagtccagtctcttctgctggcagaaagcaaatgtgacctgtgtcactacgtgactgtggcacacgccttgttcttggccaaagaccaaattccttggcatgccttccagcaccctgcaaaatgagaccctcgtggccttccccagcctcttctagagccgtgatgcctccctgttgaagctctggtgacaccagcctttctcccaggccaggctccttcctgtcttcctgcattcacccagacagctccctctgcctgaaccttccatctcgcccacccctccttccttgaccagcagatcccagctcacgtcacacacttggttgggtcctcacatctttcacacttccaccaccctgcactactccctcaaagcacacgtcatgtttcttcatccggcagcctggatgttttttccctgtttaatgattgacgtacttagcagctatctctcagtgaactgtgagggtaaaggctatacttgtcttgttcaccttgggatgacgccgcatgatatgtcagggcgtgggacatctagtaggtgcttgacataatttcactgaattaatgacagagccagtgggaagatacagaaaaagagggccggggctgggcgcggtggttcacgcctgtaatcccagcactttgggaggccaaggagggtggatcacctgaggtcaggagttagaggccagcctggcgaaaccccatctctactaaaaatacaaaatccaggcgtggtggcacacacctgtagtcccagctactcaggaggttgaggtaggagaattgcttgaacctgggaggtggaggttgcagtgagccaagattgcgccattgcactccagcctgggcaacacagcgagactccgtctcaaggaaaaaataaaaataaaaagcgggcacgggcccggacatccccacccttggaggctgtcttctcaggctctgccctgccctagctccacaccctctcccaggacccatcacgcctgtgcagtggcccccacagaaagactgagctcaaggtgggaaccacgtctgctaacttggagccccagtgccaagcacagtgcctgcatgtatttatccaataaatgtgaaattctgtccaaaaaaaaaaaa

SEQ ID NO: 137 - DNA, 383 bp, Artificial Sequence
  Description of Artificial sequences:primer
  misc_feature (1)..(383): 3' terminal sequence from clone image:1350545. spi-b transcription factor (spi-1/pu.1 related)(SPIB) gene.
agacacataaaaaggggcagcagaatagttccagagaattgggggatctcaaaaatgaggggacagatgtgacaacacagccatagatgggcgaagagatctgagatgataacagctcccagagggccccagacataactaggaaatctcagatctgacaagagggaaccttggacagggctcagggttgccagcagggcccccaccccagatgagattcagggtttacagacacacagcgatcttaaaaacgtcccaggcctcactggggaatcagatatcacaagaaaatcccagagaagctcttgggattctggaagaactgctaccctgcctccccgagtatagtggtccataggtcctgtcacccaaacatgaggatc

SEQ ID NO: 138 - DNA, 1444 bp, Artificial Sequence
  Description of Artificial sequences:primer
  misc_feature (1)..(1444): spi-b transcription factor (spi-1/pu.1 related)(SPIB) gene.
ccaccatgctcgccctggaggctgcacagctcgacgggccacacttcagctgtctgtacccagatggcgtcttctatgacctggacagctgcaagcattccagctaccctgattcagagggggctcctgactccctgtgggactggactgtggccccacctgtcccagccaccccctatgaagccttcgacccggcagcagccgcttttagccacccccaggctgcccagctctgctacgaaccccccacctacagccctgcagggaacctcgaactggcccccagcctggaggccccggggcctggcctccccgcataccccacggagaacttcgctagccagaccctggttcccccggcatatgccccgtaccccagccctgtgctatcagaggaggaagacttaccgttggacagccctgccctggaggtctcggacagcgagtcggatgaggccctcgtggctggccccgaggggaagggatccgagggactcgcaagaagctgcgcctgtaccagttcctgctggggctactgacgcgcggggacatgcgtgagtgcgtgtggtgggtggagccaggcgccggcgtcttccagttctcctccaagcacaaggaactcctggcgcgccgctggggccagcagaaggggaaccgcaagcgcatgacctaccagaagctggcgcgcgccctccgaaactacgccaagaccggcgagatccgcaaggtcaagcgcaagctcacctaccagttcgacagcgcgctgctgcctgcagtccgccgggcctgagcacacccgaggctcccacctgcggagccgctgggggacctcacgtcccagccaggatccccctggaagaaaaagggcgtccccacactctaggtgataggacttacgcatccccaccttttggggtaaggggagtgctgccctgccataatccccaagcccagcccgggcctgtctgggattccccacttgtgcctggggtccctctgggatttctttgtcatgtacagactccctgggatcctcatgttttgggtgacaggacctatggaccactatactcggggaggcagggtagcagtgcttccagagtcccaagagcttctctgggattttcttgtgatatctgattccccagtgaggcctgggacctttttaagatcgctgtgtgtctgtaaaccctgaatctcatctggggtgggggccctgctggcaaccctgagccctgtccaaggttccctcttgtcagatctgagatttcctagttatgtctggggccctctgggagctgttatcatctcagatctcttcgcccatctatggctgtgttgtcacatctgtcccctcatttttgagatcccccaattctctggaactattctgctgcccctttttatgtgtctggagttccccaatcacatctagggctcctcc

SEQ ID NO: 139 - DNA, 368 bp, Artificial Sequence
  Description of Artificial sequences:primer
  misc_feature (1)..(368): 3' terminal sequence from clone image:135221. s100 calcium binding protein p(S100P) gene.
  misc_feature (186)..(186): n is a, c, g, or t
  misc_feature (319)..(319): n is a, c, g, or t
  misc_feature (327)..(327): n is a, c, g, or t
  misc_feature (343)..(343): n is a, c, g, or t
  misc_feature (359)..(359): n is a, c, g, or t
  misc_feature (364)..(364): n is a, c, g, or t
catttcataagcatttattaatcagaggtacatgagcaggctcagcctaggggaataattgccaacaaacacttttgggaagcctgggaccatggctctgcaggcaatctgtgacatctccagggcatcatttgagtcctgccttctcaaagtacttgtgacaggcagacgtgattgcagccacgnaacacgatgaactcactgaaggtccaccgggggcatctccattgggcgtccggggtccttgaggcaatttatccacggcatccttgtctttttccacttctagaggagagagaggcttaaggggtcagcagtnaggggttncctttgcaggggcttnagccttccacaagganttttnttgg

SEQ ID NO: 140 - DNA, 352 bp, Artificial Sequence
  Description of Artificial sequences:primer
  misc_feature (1)..(352): 5' terminal sequence from clone image:135221. s100 calcium binding protein p(S100P) gene.
  misc_feature (309)..(309): n is a, c, g, or t
gcaaagactggatgcatttcctgagaacaaccatcactgtaaagcactttacaaatccaaagacaacccccggcaaaaactcaaaatgaaactccctctcgcagagcacaattccaattcgctctaaaaacattacaagttagttcatgtcatgccagatagctgaaggcagcttcacaagttcttaaggccaggaatgccatgtgtctgctatgcacagctgggccctggcccttgaggcctggaatggacaggcaaaggttgacggcagatgttgggtgccctgcttccttgccccagcagcagtgntttgggtgggaggctttagggcccttgcacagggcacccctca

SEQ ID NO: 141 - DNA, 439 bp, Artificial Sequence
  Description of Artificial sequences:primer
  misc_feature (1)..(439): s100 calcium binding protein p(S100P) gene.
ggtgggtctgaatctagcaccatgacggaactagagacagccatgggcatgatcatagacgtcttttcccgatattcgggcagcgagggcagcacgcagaccctgaccaagggggagctcaaggtgctgatggagaaggagctaccaggcttcctgcagagtggaaaagacaaggatgccgtggataaattgctcaaggacctggacgccaatggagatgcccaggtggacttcagtgagttcatcgtgttcgtggctgcaatcacgtctgcctgtcacaagtactttgagaaggcaggactcaaatgatgccctggagatgtcacagattcctgcagagccatggtcccaggcttcccaaaagtgtttgttggcaattattcccctaggctgagcctgctcatgtacctctgattaataaatgcttatgaaaaaaaaa

SEQ ID NO: 142 - DNA, 379 bp, Artificial Sequence
  Description of Artificial sequences:primer
  misc_feature (1)..(379): 3' terminal sequence from clone image:135302. poliovirus receptor-related 3(PVRL3) gene.
  misc_feature (275)..(275): n is a, c, g, or t
  misc_feature (357)..(357): n is a, c, g, or t
  misc_feature (362)..(362): n is a, c, g, or t
gtcacaaagatagcaatgatgaaaagggcaagaacagctccaattaccgctccagctacagctatggaagaggtctgcttaaatggaacatctgaaatgtagatgactttttggtcacttctttgaccaagggaattggtcactttacagatataaacaccagaataattgaaagtcaatggatggacaaaatgaagagtattgtctgaagccaataaaccatcaggccattgtcccatcccaaccctgctcccacacagatttgaagggtgggnggattttgccatcagcatttccattttgaggattaccaccttttcttccctaccaacccattttcccatcatatccctgttncccgnactttcaggggcctact

SEQ ID NO: 143 - DNA, 500 bp, Artificial Sequence
  Description of Artificial sequences:primer
  misc_feature (1)..(500): 5' terminal sequence from clone image:135302. poliovirus receptor-related 3(PVRL3) gene.
  misc_feature (333)..(333): n is a, c, g, or t
  misc_feature (414)..(414): n is a, c, g, or t
  misc_feature (420)..(420): n is a, c, g, or t
  misc_feature (447)..(447): n is a, c, g, or t
  misc_feature (458)..(458): n is a, c, g, or t
  misc_feature (466)..(466): n is a, c, g, or t
  misc_feature (472)..(472): n is a, c, g, or t
  misc_feature (477)..(477): n is a, c, g, or t
  misc_feature (482)..(482): n is a, c, g, or t
  misc_feature (490)..(490): n is a, c, g, or t
  misc_feature (496)..(496): n is a, c, g, or t
ctacaacttcttttccaaatgaaacggcaacgattatcagccagtacaagctatttccaaccagatttgctagaggaaggcgaattacttgtgttgtaaaacatccagccttggaaaaggacatccgatactctttcatattagacatacagtatgctcctgaagtttcggcaacaggatatgatggaaattggtttgtaggaagaaaaggtgttaatctcaaatgtaatgctgatgcaaatccaccacccttcaaatctgtgtgggagcaggttgggatgggacaatggcctgatggtttattggcttcagacaatactcttcatttgtccntccattgactttcattattctgggtgtttatatctgtaaagtgacccattcccttgggtcaaggagtgacccaaaagtccntctacntttccggtgtttccttttaggcggacnttttcctaggngttggctnggagcnggtantgggngccgttcntgcccntttc

SEQ ID NO: 144 - DNA, 1650 bp, Artificial Sequence
  Description of Artificial sequences:primer
  misc_feature (1)..(1650): poliovirus receptor-related 3(PVRL3) gene.
atggcgcggaccctgcggccgtccccgctgtgtcctggaggcggcaaagcacaactttcctccgcttctctcctcggagccgggctcctgctgcagcccccgacgccacctccgctgctgctgctgctcttcccgctgctgctcttctccaggctctgtggtgccttagctggaccaattattgtggagccacatgtcacagcagtatggggaaagaatgtttcattaaagtgtttaattgaagtaaatgaaaccataacacagatttcatgggagaagatacatggcaaaagttcacagactgttgcagttcaccatccccaatatggattctctgttcaaggagaatatcagggaagagtcttgtttaaaaattactcacttaatgatgcaacaattactctgcataacataggattctctgattctggaaaatacatctgcaaagctgttacattcccgcttggaaatgcccagtcctctacaactgtaactgtgttagttgaacccactgtgagcctgataaaagggccagattctttaattgatggaggaaatgaaacagtagcagccatttgcatcgcagccactggaaaacccgttgcacatattgactgggaaggtgatcttggtgaaatggaatccactacaacttcttttccaaatgaaacggcaacgattatcagccagtacaagctatttccaaccagatttgctagaggaaggcgaattacttgtgttgtaaaacatccagccttggaaaaggacatccgatactctttcatattagacatacagtatgctcctgaagtttcggtaacaggatatgatggaaattggtttgtaggaagaaaaggtgttaatctcaaatgtaatgctgatgcaaatccaccacccttcaaatctgtgtggagcaggttggatggacaatggcctgatggtttattggcttcagacaatactcttcattttgtccatccattgactttcaattattctggtgtttatatctgtaaagtgaccaattcccttggtcaaagaagtgaccaaaaagtcatctacatttcagatcctcctactactaccacccttcagcctacaattcagtggcatccctcaactgctgacatcgaggatctagcaacagaacctaaaaaattgcccttcccattgtcaactttggcaacaattaaggatgacacaattgccacgatcattgctagtgtagtgggtggggctctcttcatagtacttgtaagtgttttggctggaatattctgctataggagaagacggacgtttcgtggagactactttgccaagaactacattccaccatcagatatgcaaaaagaatcacaaatagatgttcttcaacaagatgagcttgattcttacccagacagtgtaaaaaaagaaaacaaaaatccagtgaacaatctaatacgtaaagactatttagaagagcctgaaaaaactcagtggaacaatgtagaaaatctcaataggtttgaaagaccaatggattattatgaagatctaaaaatgggaatgaagtttgtcagtgatgaacattatgatgaaaacgaagatgacttagtttcacatgtagatggttccgtaatttccaggagggagtggtatgtttag

SEQ ID NO: 145 - DNA, 423 bp, Artificial Sequence
  Description of Artificial sequences:primer
  misc_feature (1)..(423): 3' terminal sequence from clone image:136361.
  misc_feature (36)..(36): n is a, c, g, or t
  misc_feature (38)..(39): n is a, c, g, or t
  misc_feature (385)..(385): n is a, c, g, or t
  misc_feature (402)..(402): n is a, c, g, or t
  misc_feature (409)..(409): n is a, c, g, or t
  misc_feature (421)..(421): n is a, c, g, or t
tcgagggaagcacccgccggttggccgaagtccacntnngccgccctctgctagggaaaacccctggttctccatgccacacctctctccaggtgccctctgcctcttcaccccacaagaagccttatcctacgtccttctctccatctatcggaccccagtttccatcactatctccagagatgtagctattatgcgcccgtctacagggggtgcccgacgatgacggtgccttcgcagtcaaattactcttcgggtcccaaggtttgggctttcacgcgctccattgccccggcgtgggcagggccatttccaaggcccttccgggtgggaaactgggtgttcgggagggagcctcggggtgtattcgtaacggccctgggtntttgggtgttttgcctnacttctnttgaggctcttntt

SEQ ID NO: 146 - DNA, 456 bp, Artificial Sequence
  Description of Artificial sequences:primer
  misc_feature (1)..(456): 5' terminal sequence from clone image:136361.
  misc_feature (152)..(153): n is a, c, g, or t
  misc_feature (363)..(363): n is a, c, g, or t
  misc_feature (384)..(384): n is a, c, g, or t
  misc_feature (405)..(405): n is a, c, g, or t
gttttttttttttttttatcattcattctattttatttaactttaagcagggcttgatcagaaagaagagctcagaggagtgaggcaacaccaacaccagggcgtacgatacacccgaggctcctccgacaccagttccagcccggaacgtnnggaatggcctgccacgccggggcaatggagcgcgtgaaagccaaaccttgggacccgaagagtaatttgactgcgaaggcaccgtcatcgtcgggcaccccctgtagacgggcgcataatagctacatctctgggagatagtgatgggaaactgggggtccgatagatgggagagaaggacgtagggttaaggcttttttgtgggggttnaaggaggccagagggcacctngggagagaggttttggccttnggagaaccaggggtttttcccttagccagaagggccgtttccttgggattt

SEQ ID NO: 147 - DNA, 457 bp, Artificial Sequence
  Description of Artificial sequences:primer
  misc_feature (1)..(457): 3' terminal sequence from clone image:139069. cytochrome c oxidase subunit via polypeptide 1(COX6A1) gene.
  misc_feature (1)..(3): n is a, c, g, or t
  misc_feature (49)..(49): n is a, c, g, or t
  misc_feature (181)..(181): n is a, c, g, or t
  misc_feature (257)..(257): n is a, c, g, or t
  misc_feature (321)..(321): n is a, c, g, or t
  misc_feature (348)..(348): n is a, c, g, or t
  misc_feature (357)..(357): n is a, c, g, or t
  misc_feature (400)..(400): n is a, c, g, or t
  misc_feature (414)..(414): n is a, c, g, or t
nnnttttttttctaagtttaagttatttatttaagccatctcctgccanaagcaaagggatgggagaccagtataccagtcatcatttgatacaagtaaagaaggtgagcttaaggtcccatatactttttctggtccatgtgcagagtaacggtccaaaccagtgctgtggtccctgggngcccgggtagtggtccagattctctttattcatcttcgtagccagttggaagtggattcacatgagggttatggantagagtatggttaccatctccccagggaaacggcttggtcctgatgcggagatgggggtaggcnatgaactcgggtctctcgtgctctccntggtgcganttcaggtacacattcagcatgctgactgccaccccggggagcncgacgaagaaggtnagattttccacatgcgagctgagcccttttcgccatgggccca

SEQ ID NO: 148 - DNA, 447 bp, Artificial Sequence
  Description of Artificial sequences:primer
  misc_feature (1)..(447): 5' terminal sequence from clone image:139069. cytochrome c oxidase subunit via polypeptide 1(COX6A1) gene.
  misc_feature (57)..(57): n is a, c, g, or t
  misc_feature (83)..(83): n is a, c, g, or t
  misc_feature (377)..(377): n is a, c, g, or t
  misc_feature (412)..(412): n is a, c, g, or t
  misc_feature (438)..(438): n is a, c, g, or t
gttggtgtgtcctcggtttctcggctgctgggtcggtcccgcccacagctggggcgncctatgtcgagtggcgcccatggaangagggctcagctcgcatgtggaagactctcaccttcttcgtcgcgctccccggggtggcagtcagcatgctgaatgtgtacctgaattcgcaccacggagagcacgagagacccgagttcatcgcctacccccatctccgcatcaggaccaagccgtttccctggggagatggtaaccatactctattccataaccctcatgtgaatccacttccaactggctacgaagatgaataaagagaatctgggaccattacccgggcaccaggggaccacagcattggttttggaccnttaatttttgcacattgggaccagaaaaagttttntggggaccttaagtttaacttttttnatttgtaat

SEQ ID NO: 149 - DNA, 548 bp, Artificial Sequence
  Description of Artificial sequences:primer
  misc_feature (1)..(548): cytochrome c oxidase subunit via polypeptide 1(COX6A1) gene.
cggcgctgcggcagtccagatcaaaaatggcggtagttggtgtgtcctcggtttctcggctgctgggtcggtcccgcccacagctggggcggcctatgtcgagtggcgcccatggcgaagagggctcagctcgcatgtggaagactctcaccttcttcgtcgcgctccccggggtggcagtcagcatgctgaatgtgtacctgaagtcgcaccacggagagcacgagagacccgagttcatcgcctacccccatctccgcatcaggaccaagccgtttccctggggagatggtaaccatactctattccataaccctcatgtgaatccacttccaactggctacgaagatgaataaagagaatctggaccactacccgggcaccagggaccacagcactggtttggaccgttactctgcacatggaccagaaaaagtatatgggaccttaagctaaccttctttacttgtatcaaatgatgactggtatactggtctcccatccctttgcttgtggcaggagatggcttaaataaataacttaaactt

SEQ ID NO: 150 - DNA, 365 bp, Artificial Sequence
  Description of Artificial sequences:primer
  misc_feature (1)..(365): 3' terminal sequence from clone image:139073. interleukin 2 receptor, beta(IL2RB) gene.
  misc_feature (269)..(269): n is a, c, g, or t
  misc_feature (287)..(287): n is a, c, g, or t
  misc_feature (330)..(330): n is a, c, g, or t
  misc_feature (352)..(352): n is a, c, g, or t
gtacagttaccttttatttatagcgaaaatgggttttttcatttacagagtaacaaagatttttctttaaataaatgtatttcaacgaaaatgaactgacttaaagaaaaaatattaaggaaataatcacaaagatggtacacacggatcattaaaagatacggatgtataggatacatatgtcacaaatgattaaggacttaaaaaatgtaaccctcccaagaagtggggagcctcccaaagtgggggaagggcaaatacaatttccntttggggggggatagggngaccccctttgcagagaggggttaggtggggtttccccccggnacacacaggcaagggtttgggngccccttgtgggg

SEQ ID NO: 151 - DNA, 366 bp, Artificial Sequence
  Description of Artificial sequences:primer
  misc_feature (1)..(366): 5' terminal sequence from clone image:139073. interleukin 2 receptor, beta(IL2RB) gene.
  misc_feature (1)..(1): n is a, c, g, or t
  misc_feature (286)..(286): n is a, c, g, or t
  misc_feature (313)..(313): n is a, c, g, or t
  misc_feature (337)..(337): n is a, c, g, or t
  misc_feature (350)..(350): n is a, c, g, or t
  misc_feature (358)..(358): n is a, c, g, or t
  misc_feature (364)..(364): n is a, c, g, or t
nattcggcactagggggcacctgaccacacgcccccacaggctctgaccagcagcctatgagggggtttggcaccaagctctgtccaatcaggtaggctgggctgaactagccaatcagatcaactctgtcttgggcgtttgaactcagggagggaggcccttgggagcaggtgcttgtggacaaggctccacaagcgttgagccttggaaaggtagacaagcgttgagccactaagcagaggaccttgggttcccaatacaaaaatacctactgctgagaggggntgctgaccattttggtcaaggatttcngtttgccttatatcccaaataaantcccttttttttnaggttttnttagtntt

SEQ ID NO: 152 - DNA, 4045 bp, Artificial Sequence
  Description of Artificial sequences:primer
  misc_feature (1)..(4045): interleukin 2 receptor, beta(IL2RB) gene.
gcagccagagctcagcagggccctggagagatggccacggtcccagcaccggggaggactggagagcgcgcgctgccaccgccccatgtctcagccagggcttccttcctcggctccaccctgtggatgtaatggcggcccctgctctgtcctggcgtctgcccctcctcatcctcctcctgcccctggctacctcttgggcatctgcagcggtgaatggcacttcccagttcacatgcttctacaactcgagagccaacatctcctgtgtctggagccaagatggggctctgcaggacacttcctgccaagtccatgcctggccggacagacggcggtggaaccaaacctgtgagctgctccccgtgagtcaagcatcctgggcctgcaacctgatcctcggagccccagattctcagaaactgaccacagttgacatcgtcaccctgagggtgctgtgccgtgagggggtgcgatggagggtgatggccatccaggacttcaagccctttgagaaccttcgcctgatggcccccatctccctccaagttgtccacgtggagacccacagatgcaacataagctgggaaatctcccaagcctcccactactttgaaagacacctggagttcgaggcccggacgctgtccccaggccacacctgggaggaggcccccctgctgactctcaagcagaagcaggaatggatctgcctggagacgctcaccccagacacccagtatgagtttcaggtgcgggtcaagcctctgcaaggcgagttcacgacctggagcccctggagccagcccctggccttcaggacaaagcctgcagcccttgggaaggacaccattccgtggctcggccacctcctcgtgggcctcagcggggcttttggcttcatcatcttagtgtacttgctgatcaactgcaggaacaccgggccatggctgaagaaggtcctgaagtgtaacaccccagacccctcgaagttcttttcccagctgagctcagagcatggaggagacgtccagaagtggctctcttcgcccttcccctcatcgtccttcagccctggcggcctggcacctgagatctcgccactagaagtgctggagagggacaaggtgacgcagctgctcctgcagcaggacaaggtgcctgagcccgcatccttaagcagcaaccactcgctgaccagctgcttcaccaaccagggttacttcttcttccacctcccggatgccttggagatagaggcctgccaggtgtactttacttacgacccctactcagaggaagaccctgatgagggtgtggccggggcacccacagggtcttccccccaacccctgcagcctctgtcaggggaggacgacgcctactgcaccttcccctccagggatgacctgctgctcttctcccccagtctcctcggtggccccagccccccaagcactgcccctgggggcagtggggccggtgaagagaggatgcccccttctttgcaagaaagagtccccagagactgggacccccagcccctggggcctcccaccccaggagtcccagacctggtggattttcagccaccccctgagctggtgctgcgagaggctggggaggaggtccctgacgctggccccagggagggagtcagtttcccctggtccaggcctcctgggcagggggagttcagggcccttaatgctcgcctgcccctgaacactgatgcctacttgtccctccaagaactccagggtcaggacccaactcacttggtgtagacagatggccagggtgggaggcaggcagctgcctgctctgcgccgagcctcagaaggaccctgttgagggtcctcagtccactgctgaggacactcagtgtccagttgcagctggacttctccacccggatggcccccacccagtcctgcacacttggtccatccatttccaaacctccactgctgctcccgggtcctgctgcccgagccaggaactgtgtgtgttgcaggggggcagtaactccccaactccctcgttaatcacaggatcccacgaatttaggctcagaagcatcgctcctctccagccctgcagctattcaccaatatcagtcctcgcggctctccagggctccctgccctgacctcttccctgggttttctgccccagcctcctccttccctcccctccccgtccacagggcagcctgagcgtgctttccaaaacccaaatatggccacgctccccctcggttcaaaaccttgcacaggtcccactgccctcagccccacttctcagcctggtacttgtacctccggtgtcgtgtggggacatccccttctgcaatcctccctaccgtcctcctgagccactcagagctccctcacaccccctctgttgcacatgctattccctggggctgctgtgcgctccccctcatctaggtgacaaacttccctgactcttcaagtgccggttttgcttctcctggagggaagcactgcctcccttaatctgccagaaacttctagcgtcagtgctggagggagaagctgtcagggacccagggcgcctggagaaagaggccctgttactattcctttgggatctctgaggcctcagagtgcttggctgctgtatctttaatgctggggcccaagtaagggcacagatccccccacaaagtggatgcctgctgcatcttcccacagtggcttcacagacccacaagagaagctgatggggagtaaaccctggagtccgaggcccaggcagcagccccgcctagtggtgggccctgatgctgccaggcctgggacctcccactgccccctccactggaggggtctcctctgcagctcagggactggcacactggcctccagaagggcagctccacagggcagggcctcattatttttcactgccccagacacagtgcccaacaccccgtcgtataccctggatgaacgaattaattacctggcaccacctcgtctgggctccctgcgcctgacattcacacagagaggcagagtcccgtgcccattaggtctggcatgccccctcctgcaaggggctcaaccccctaccccgacccctccacgtatctttcctaggcagatcacgttgcaatggctcaaacaacattccaccccagcaggacagtgaccccagtcccagctaactctgacctgggagccctcaggcacctgcacttacaggccttgctcacagctgattgggcacctgaccacacgcccccacaggctctgaccagcagcctatgagggggtttggcaccaagctctgtccaatcaggtaggctgggcctgaactagccaatcagatcaactctgtcttgggcgtttgaactcagggagggaggcccttgggagcaggtgcttgtggacaaggctccacaagcgttgagccttggaaaggtagacaagcgttgagccactaagcagaggaccttgggttcccaatacaaaaatacctactgctgagagggctgctgaccatttggtcaggattcctgttgcctttatatccaaaataaactcccctttcttgaggttgtctgagtcttgggtctatgccttgaaaaaagctgaattattggacagtctcacctcctgccatagggtcctgaatgtttcagaccacaaggggctccacacctttgctgtgtgttctggggcaacctactaatcctctctgcaagtcggtctccttatccccccaaatggaaattgtatttgccttctccactttgggaggctcccacttcttgggagggttacattttttaagtcttaatcatttgtgacatatgtatctatacatccgtatcttttaatgatccgtgtgtaccatctttgtgattatttccttaatattttttctttaagtcagttcattttcgttgaaatacatttatttaaagaaaaatctttgttactctgtaaatgaaaaaacccattttcgctataaataaaaggtaactgtacaaaataagtacaatgcaacaaaa

SEQ ID NO: 153 - DNA, 934 bp, Artificial Sequence
  Description of Artificial sequences:primer
  misc_feature (1)..(934): 3' terminal sequence from clone image:1391584. cyclin-dependent kinase 2(CDK2) gene.
tttgaactataaaactaggcacatttttttaatgagctacaaactaaattacaaataacgttaatagcaagagcactcaaggacaagggtgacagagacaaatcataaaaaaaaaatgctttttttttttagcactgtcattacaaaaccccaaggtgcacatggcaacaaatccacccactatgaccaaaaaaaaaaaaaaaaagccaactctactattggatataacctgaaatataaatataattgttcatccttcttttaaagaaatatttttacccatgccctcactcaatcacagccctgaaaaagtgtcagcattctcaaaatgatgcctaaaccctaacttctaactcctatggggtaggaggtggacgtcagaggaaaatgggatcagggatccttggcaactgaacaactaagaatactaaaaggaagagaaaaattcaaacatctctcacctgcctcataaggccatggtgaagcaatagattggaatgaagcacaatccctgtctcagggcctcccagattcctcatgcctgtagaagggacaaacaaggggactggggccaatcatttttctgcagccccacccgggctgagtcttcagtctccccagcctataggtgggggcaaacactaactagggtataaactgattggatctatttttccacccggattctttaaaaaagaaccccccagggggttttgttttacttgggttcccaaaagacccaacttgcccccccctatccatttggcttttttaacctttgggcaagcggaggggtggggtcccgggtctcccccacaccgggaaataaaattttggggggcttcaggaatgtggtacggccaatcaccggggtgggatggttttttaaaattttttttttaccacccccttcccgcataaactaaaaaagggg

SEQ ID NO: 154 - DNA, 2328 bp, Artificial Sequence
  Description of Artificial sequences:primer
  misc_feature (1)..(2328): cyclin-dependent kinase 2(CDK2) gene.
ggaagcagggcggggcctctggtggcggtcgggaactcggtgggaggcggcaacattgtttcaagttggccaaattgacaagagcgagaggtatactgcgttccatcccgacccggggccacggtactgggccctgtttccccctcctcggcccccgagagccagggtccgccttctgcagggttcccaggcccccgctccagggccgggctgacccgactcgctggcgcttcatggagaacttccaaaaggtggaaaagatcggagagggcacgtacggagttgtgtacaaagccagaaacaagttgacgggagaggtggtggcgcttaagaaaatccgcctggacactgagactgagggtgtgcccagtactgccatccgagagatctctctgcttaaggagcttaaccatcctaatattgtcaagctgctggatgtcattcacacagaaaataaactctacctggtttttgaatttctgcaccaagatctcaagaaattcatggatgcctctgctctcactggcattcctcttcccctcatcaagagctatctgttccagctgctccagggcctagctttctgccattctcatcgggtcctccaccgagaccttaaacctcagaatctgcttattaacacagagggggccatcaagctagcagactttggactagccagagcttttggagtccctgttcgtacttacacccatgaggtggtgaccctgtggtaccgagctcctgaaatcctcctgggctgcaaatattattccacagctgtggacatctggagcctgggctgcatctttgctgagatggtgactcgccgggccctattccctggagattctgagattgaccagctcttccggatctttcggactctggggaccccagatgaggtggtgtggccaggagttacttctatgcctgattacaagccaagtttccccaagtgggcccggcaagattttagtaaagttgtacctcccctggatgaagatggacggagcttgttatcgcaaatgctgcactacgaccctaacaagcggatttcggccaaggcagccctggctcaccctttcttccaggatgtgaccaagccagtaccccatcttcgactctgatagccttcttgaagcccccagccctaatctcaccctctcctccagtgtgggcttgaccaggcttggccttgggctatttggactcaggtgggccctctgaacttgccttaaacactcaccttctagtcttggccagccaactctgggaatacaggggtgaaaggggggaaccagtgaaaatgaaaggaagtttcagtattagatgcacttaagttagcctccaccaccctttcccccttctcttagttattgctgaagagggttggtataaaaataattttaaaaaagccttcctacacgttagatttgccgtaccaatctctgaatgccccataattattatttccagtgtttgggatgaccaggatcccaagcctcctgctgccacaatgtttataaaggccaaatgatagcgggggctaagttggtgcttttgagaaccaagtaaaacaaaaccactgggaggagtctattttaaagaattcggttgaaaaaatagatccaatcagtttataccctagttagtgttttgcctcacctaataggctgggagactgaagactcagcccgggtggggctgcagaaaaatgattggccccagtccccttgtttgtcccttctacaggcatgaggaatctgggaggccctgagacagggattgtgcttcattccaatctattgcttcaccatggccttatgaggcaggtgagagatgtttgaatttttctcttccttttagtattcttagttgttcagttgccaaggatccctgatcccattttcctctgacgtccacctcctaccccataggagttagaagttagggtttaggcatcattttgagaatgctgacactttttcagggctgtgattgagtgagggcatgggtaaaaatatttctttaaaagaaggatgaacaattatatttatatttcaggttatatccaatagtagagttggcttttttttttttttttttggtcatagtgggtggatttgttgccatgtgcaccttggggttttgtaatgacagtgctaaaaaaaaaaaagcatttttttttatgatttgtctctgtcacccttgtccttgagtgctcttgctattaacgttatttgtaatttagtttgtagctcattaaaaaaatgtgcctagttttataaaaaaaaaaaaaaaaaaaaaaaaaaaaaaaaaaaaaaa

SEQ ID NO: 155 - DNA, 438 bp, Artificial Sequence
  Description of Artificial sequences:primer
  misc_feature (1)..(438): 3' terminal sequence from clone image:139304. g protein-coupled receptor 1(GPR1) gene.
  misc_feature (192)..(192): n is a, c, g, or t
  misc_feature (407)..(407): n is a, c, g, or t
  misc_feature (438)..(438): n is a, c, g, or t
aagataaccaacaattactttaattcataaatgtatatacatagattacataaagaaattaagtacacatgttgcattttaaaaatgtgtctagcaggttattgtacaaaattaaaatgaatttaagaatacattttaacatttttaaaattagttaatcatatatttatttatctattttatttatttatntttgagacagagttttactcttgttgcccaggctggagtgcaatggtgtgatgttggctcaccacaacctctgcctcccagggttcaagtgattctcctgcttcagcctcccgagtagctgggtttgcagacatgcaccaccatgaccggctaattttgtatttttagtaggagacggggtttctccatgttggtcaggctggtctcgaattccngaccccgggtaatccccccaccttgggcctn

SEQ ID NO: 156 - DNA, 442 bp, Artificial Sequence
  Description of Artificial sequences:primer
  misc_feature (1)..(442): 5' terminal sequence from clone image:139304. g protein-coupled receptor 1(GPR1) gene.
  misc_feature (418)..(418): n is a, c, g, or t
  misc_feature (430)..(430): n is a, c, g, or t
gctgacagtgatcagcctggaccactatatccacttgatccatcctgtcttatctcatcggcatcgaaccctcaagaactctctgattgtcattatattcatctggcttttggcttctctaattggcggtcctgccctgtacttccgggacactgtggagttcaataatcatactctttgctataacaattttcagaagcatgatcctgacctcactttgatcaggcaccatgttctgacttgggtgaaatttatcattggctatctcttccctttgctaacaatgagtatttgctacttgtgtctcatcttcaaggtgaagaagcgaagattcctggatctccagtagggcatttctgggacaattctgggttgtgggtgtgggcctttgtgggtttgctgggactccttatcaccngtttaggcattngggagctcaaca

SEQ ID NO: 157 - DNA, 1068 bp, Artificial Sequence
  Description of Artificial sequences:primer
  misc_feature (1)..(1068): g protein-coupled receptor 1(GPR1) gene.
atggaagatttggaggaaacattatttgaagaatttgaaaactattcctatgacctagactattactctctggagtctgatttggaggagaaagtccagctgggagttgttcactgggtctccctggtgttatattgtttggcttttgttctgggaattccaggaaatgccatcgtcatttggttcacggggctcaagtggaagaagacagtcaccactctgtggttcctcaatctagccattgcggatttcatttttcttctctttctgcccctgtacatctcctatgtggccatgaatttccactggccctttggcatctggctgtgcaaagccaattccttcactgcccagttgaacatgtttgccagtgtttttttcctgacagtgatcagcctggaccactatatccacttgatccatcctgtcttatctcatcggcatcgaaccctcaagaactctctgattgtcattatattcatctggcttttggcttctctaattggcggtcctgccctgtacttccgggacactgtggagttcaataatcatactctttgctataacaattttcagaagcatgatcctgacctcactttgatcaggcaccatgttctgacttgggtgaaatttatcattggctatctcttccctttgctaacaatgagtatttgctacttgtgtctcatcttcaaggtgaagaagcgaacagtcctgatctccagtaggcatttctggacaattctggttgtggttgtggcctttgtggtttgctggactccttatcacctgtttagcatttgggagctcaccattcaccacaatagctattcccaccatgtgatgcaggctggaatccccctctccactggtttggcattcctcaatagttgcttgaaccccatcctttatgtcctaattagtaagaagttccaagctcgcttccggtcctcagttgctgagatactcaagtacacactgtgggaagtcagctgttctggcacagtgagtgaacagctcaggaactcagaaaccaagaatctgtgtctcctggaaacagctcaataa

SEQ ID NO: 158 - DNA, 428 bp, Artificial Sequence
  Description of Artificial sequences:primer
  misc_feature (1)..(428): 3' terminal sequence from clone image:139392. pregnancy specific beta-1-glycoprotein 6(PSG6) gene.
  misc_feature (180)..(180): n is a, c, g, or t
  misc_feature (198)..(198): n is a, c, g, or t
  misc_feature (204)..(204): n is a, c, g, or t
  misc_feature (267)..(267): n is a, c, g, or t
  misc_feature (290)..(290): n is a, c, g, or t
  misc_feature (333)..(333): n is a, c, g, or t
  misc_feature (346)..(346): n is a, c, g, or t
  misc_feature (391)..(391): n is a, c, g, or t
  misc_feature (401)..(401): n is a, c, g, or t
  misc_feature (415)..(415): n is a, c, g, or t
  misc_feature (422)..(422): n is a, c, g, or t
gatcttttgcaaatagctttattaccataaacctatgaatactcatgaatagattcccaattctggggcactcagatagagagcaaaaggaaatgtttcaatttttgtttacaaaagtatactttaccaattgctcaagaaaaaatgttcataaatctggagaatgaaacattccaagantcagcacattttcaaatnggaaanttatggaaatcattatccttttgattatttaggtccaataacattgaggtatttttcttcttngtcttggaatttcatgaagggtntcaggcctggttcattaaaattttggaaaggttcttaggtccngtggggtatgganccttggaaggttatccggggggccttggtatttcagggggtcccntggtaagggnggaccctttcccanaaatccncccggc

SEQ ID NO: 159 - DNA, 455 bp, Artificial Sequence
  Description of Artificial sequences:primer
  misc_feature (1)..(455): 5' terminal sequence from clone image:139392. pregnancy specific beta-1-glycoprotein 6(PSG6) gene.
  misc_feature (158)..(158): n is a, c, g, or t
  misc_feature (245)..(245): n is a, c, g, or t
  misc_feature (345)..(345): n is a, c, g, or t
  misc_feature (350)..(350): n is a, c, g, or t
  misc_feature (359)..(359): n is a, c, g, or t
  misc_feature (376)..(376): n is a, c, g, or t
  misc_feature (388)..(388): n is a, c, g, or t
  misc_feature (397)..(397): n is a, c, g, or t
  misc_feature (407)..(407): n is a, c, g, or t
  misc_feature (414)..(414): n is a, c, g, or t
  misc_feature (423)..(423): n is a, c, g, or t
gacccttcatacaccaattaccgttcaggagataacctctacttgtcttgcttcgcgaactctaacccaccggcacagtattcttggacaattaatgggaagtttcagcaatcaggacaaaatctgtttatcccccaaattactacaaagcatagcgnggctctatgtttgctctgttcgtaactcagccactggcgagggaaagctccacatcgttgacagtcaaagtctctgcttctacaagnataggacttcttcctctccttaatccaacataggcagctgtggatgtcatttctgtatttcagggaaggactgggcagggaggatttatgggaaaggttntcttnacaagggantcttggaattacaaggntcctggattaantttcagggntcataaccantgggganttaaggaantttccaaattttttaatggaacaggttggtta

SEQ ID NO: 160 - DNA, 1989 bp, Artificial Sequence
  Description of Artificial sequences:primer
  misc_feature (1)..(1989): pregnancy specific beta-1-glycoprotein 6(PSG6) gene.
attcgggcctaggctcatctccacagaggagaacacgcagggagcagagaccatggggcccctctcagcccctccctgcacacagcatataacctggaaagggctcctgctcacagcatcacttttaaacttctggaacccgcccaccacagcccaagtcacgattgaagcccagccaccaaaagtttctgaggggaaggatgttcttctacttgtccacaatttgccccagaatcttactggctacatctggtacaaaggacaaatcagggacctctaccattatgttacatcatatgtagtagacggtcaaataattaaatatgggcctgcatacagtggacgagaaacagtatattccaatgcatccctgctgatccagaatgtcacccaggaagacacaggatcctacactttacacatcataaagcgaggtgatgggactggaggagtaactggacgtttcaccttcaccttatacctggagactcccaaaccctccatctccagcagcaatttcaaccccagggaggccacggaggctgtgatcttaacctgtgatcctgagactccagatgcaagctacctgtggtggatgaatggtcagagcctccctatgactcacagcttgcagctgtctgaaaccaacaggaccctctacctatttggtgtcacaaactatactgcaggaccctatgaatgtgaaatacggaacccagtgagtgccagccgcagtgacccagtcaccctgaatctcctcccgaagctgcccaagccctacatcaccatcaataacttaaaccccagggagaataaggatgtctcaaccttcacctgtgaacctaagagtgagaactacacctacatttggtggctaaatggtcagagcctcccggtcagtcccagggtaaagcgacgcattgaaaacaggatcctcattctacccagtgtcacgagaaatgaaacaggaccctatcaatgtgaaatacgggaccgatatggtggcatccgcagtgacccagtcaccctgaatgtcctctatggtccagacctccccagaatttacccttcgttcacctattaccattcaggacaaaacctctacttgtcctgctttgcggactctaacccaccggcacagtattcttggacaattaatgggaagtttcagctatcaggacaaaagctttctatcccccagattactacaaagcatagcgggctctatgcttgctctgttcgtaactcagccactggcaaggaaagctccaaatccgtgacagtcagagtctctgactggacattaccctgaattctactagttcctccaattccatcttctcccatggaacctcaaagagcaagacccactctgttccagaagccctataagtcagagttggacaactcaatgtaaatttcatgggaaaatccttgtacctgatgtctgagccactcagaactcaccaaaatgttcaacaccataacaacagctgctcaaactgtaaacaaggaaaacaagttgatgacttcacactgtggacagtttttcccaagatgtcagaataagactccccatcatgatgaggctctcacccctcttagctgtccttgcttgtgcctgcctctttcacttggcaggataatgcagtcattagaatttcacatgtagtataggagcttctgagggtaacaacagagtgtcagatatgtcatctcaacctcaaacttttacataacatctcaggaggaaatgtggctctctccatcttgcatacagggctcccaatagaaatgaacacagagatattgcctgtgtgtttgcagagaagatggtttctataaagagtaggaaagctgaaattatagtagagtcccctttaaatgcacattgtgtggatggctctcaccatttcctaagagatacattgtaaaacgtgacagtaagactgattctagcagaataaaacatgtactacatttgctaaa

SEQ ID NO: 161 - DNA, 343 bp, Artificial Sequence
  Description of Artificial sequences:primer
  misc_feature (1)..(343): 3' terminal sequence from clone image:139789. epidermal growth factor receptor pathway substrate 15(EPS15) gene.
  misc_feature (62)..(62): n is a, c, g, or t
  misc_feature (94)..(94): n is a, c, g, or t
  misc_feature (174)..(174): n is a, c, g, or t
  misc_feature (305)..(305): n is a, c, g, or t
  misc_feature (314)..(314): n is a, c, g, or t
  misc_feature (341)..(341): n is a, c, g, or t
tgaattggaaattttggaatttatttataggctaggcaataagttactcagattaacacagntcaataccaccttgacttggtgacccagaganttctaattagattttaggtgcatttttctttatcttggtatttaatacatcatctaagtcagtaaccgtgttaaacaaanttaaaatgacaagttacagcttacttcacagtctatttcaaattcagcttgtccactaggtcagttttacaggagatggtcttttaacatgaggagggtctgataatctgggcaggtctcttctctcccanttaaaaaancaagagtttttttgctaggcttgacantt

SEQ ID NO: 162 - DNA, 358 bp, Artificial Sequence
  Description of Artificial sequences:primer
  misc_feature (1)..(358): 5' terminal sequence from clone image:139789. epidermal growth factor receptor pathway substrate 15(EPS15) gene.
  misc_feature (273)..(273): n is a, c, g, or t
  misc_feature (313)..(313): n is a, c, g, or t
  misc_feature (347)..(347): n is a, c, g, or t
ttcagagataaggaaaaatattttgcacagatttactccactatggaaaagggatgctgtaggttgaaccattatagcctcagattcgatcttttcctaactaaaaatattaaagcctcatgtgtgaaataaatttttaaaaagatttatctggatttagagaattttagatcaacagatacctctcagtgtgtttgctaattaataaaaatcagtttcttacaaataaagtttgtaaggaaaatgttccatttttaaggtggataggatagntgggggaaaattttattcaccctaaaattttaccccatcnggtattaggggccaggccaaaagtcctttaaccnggggccggccc

SEQ ID NO: 163 - DNA, 4257 bp, Artificial Sequence
  Description of Artificial sequences:primer
  misc_feature (1)..(4257): epidermal growth factor receptor pathway substrate 15(EPS15) gene.
ggcctcgcctgcggccgctccctccgcctcctccccgccccgagccccagtcagcccgtcttccttcccctcccttgcatgatggaaacaccatggctgcggcggcccagctctctctgacacagttatcaagtgggaatcctgtatatgaaaaatactatagacaggttgatacaggcaatactggaagggtgttggcttctgatgctgctgctttcctgaaaaaatcagggcttccagacttgatacttggaaagatttgggatttagccgacacagatggcaaaggtatcctgaacaaacaagaattctttgttgctttgcgtcttgtggcatgtgcccagaatggattggaagtttcactaagtagtttgaacctggctgttcctccaccaagatttcatgataccagtagtcctttgctaatcagtggaacctctgcagctgagctcccatgggctgtaaaacctgaagataaggccaaatatgatgcaatatttgatagtttaagcccagtgaatggatttctgtctggtgataaagtgaaaccagtgttgctcaactctaagttacctgtggatatccttggaagagtttgggagttgagtgatattgaccatgatggaatgcttgacagagatgagtttgcagttgccatgtttttggtatactgtgcactggagaaagaacctgtgccaatgtccttgcctccagccttggtgccaccatctaagagaaaaacgtgggttgtatcccctgcagaaaaagctaaatatgatgaaatcttcctgaaaactgataaagatatggacggatttgtgtctggattggaggtccgtgaaatattcttgaaaacaggtttaccttctaccttactagcccatatatggtcattatgcgacacaaaggactgtgggaagctttcaaaggatcagtttgccttggcttttcacttaatcagtcagaagttaatcaagggcattgatcctcctcacgttcttactcctgaaatgattccaccatcagacagggccagtttacaaaagaacatcataggatcaagtcctgttgcagatttctctgctattaaggaactagatactcttaacaatgaaatagttgacctacagagggaaaagaataatgtggaacaggaccttaaggagaaggaagatactattaaacagaggacaagtgaggttcaggatcttcaagatgaagttcaaagggagaatactaatctgcaaaaactacaggcccagaaacagcaggtacaggaactccttgatgaactggatgagcagaaagcccagctggaggagcaactcaaggaagtcagaaagaaatgtgctgaggaggcccaactgatctcttctctgaaagctgaattaactagtcaggaatcgcagatctccacttatgaagaagaattggcaaaagctagagaagagctgagccgtctacagcaagaaacagcagaattggaggagagtgtagagtcagggaaggctcagttggaacctcttcagcagcacctacaagattcacaacaggaaattagttcaatgcaaatgaaactgatggaaatgaaagatttggaaaatcataatagtcagttaaattggtgcagtagcccacacagcattcttgtaaacggagctacagattattgcagcctcagcaccagcagcagtgaaacagccaaccttaatgaacatgttgaaggccagagcaacctagagtctgagcccatacaccaggaatctccagcaagaagtagtcctgaactactgccttctggtgtgactgatgaaaatgaggtgactacagctgttactgaaaaagtttgttctgaactcgacaataatagacattcaaaagaggaagatccatttaatgtagactcaagttcgctgacaggtccagttgcagatacaaacttggattttttccagtctgatccttttgttggcagtgatcctttcaaggatgatccttttggaaaaatcgatccatttggtggtgatcctttcaaaggttcagatccatttgcatcagactgtttcttcaggcaatctactgatccttttgccacttcaagcactgaccctttcagtgcagccaacaatagcagtattacatcggtagaaacgttgaagcacaatgatccttttgctcctggtggaacagttgttgcagcaagcgattcagccacagacccctttgcttctgtttttgggaatgaatcatttggaggtggatttgctgacttcagcacattgtcaaaggtcaacaatgaagatccttttcgttcagccacatcgagctctgtcagcaacgtagtgattacaaaaaatgtatttgaggaaacatcggtcaaaagtgaagatgaacccccagcactgccaccaaagatcggaactccaacaagaccctgccctctaccacctgggaaaagatccatcaacaaattggattctcctgatccctttaaactgaatgatccatttcagcctttcccaggcaacgatagccccaaagaaaaagatcctgaaatattttgtgatccattcacttctgctactaccactaccaataaagaggctgatccaagcaattttgccaacttcagtgcttatccctctgaagaagatatgatcgaatgggccaagagggaaagtgagagagaggaagagcagaggcttgcccgactaaatcagcaggaacaagaagacttagaactggctattgcactcagcaaatctgagatatcagaagcatgaagaattctcttgttctttggcaacaatatagtattcttcttcctgaatactgaaactatttacaatgtgtatcaaaactacctgtgagcatgggaatacaaaaggtttgagattcctgtaaatgtgacaaaattttaggattttttttttttcttcattacagattcgtcttttttttttttcttataaaagccgtaacccagtcagacaaattcaccttcacttaggcccctgttctgggatacatttactgtgagcttttgcctgcctgtgctattttacttgtaaagctagagcacccaagcttctgccttctggaatatagagaaatagtttcaccctgcactaccctgttctgtagttattctgatgatagccagtgaggttcttaaagtttgcagtattctcccctgattggaatggttgagtgagggtaagggaaagaatatcttatttcttttatgattggtgcaaattggctaaagtgcatttttaaatttcctctacttaatttgtttttcagagataaggaaaaatattttgcacagatttactccactatggaaaagggatgctgtaggttgaaccattatagcctcagattcgatcttttcctaactaaaaatattaaagcctcatgtgtgaaataaatttttaaaaagatttatctggatttagagaattttagatcaacagatacctctcagtgtgtttgctaattaataaaaatcagtttcttacaaataaagtttgtaagaaaatgttcattttaagtgatagatagtggagaaaatttatcacctaaaatatacccatcagtataaggcaagcaaaagtcttaacatggcagccattctgcctttgccgtggccctgtcctgtttagttcttagtgggttaatttttgtacttttgcagaagaaacttcagcaagctagaactggaaggtactttaatttttcatatatatttgtttttttttttttttaatgaaggctcatttacttgaaatgtaaaaactttcactgaatacaaatagaaaaagtgatgtgttttatatcatattgctttttgtccatctttgtggtttagtttatttactcacttcatgtttttcacctataaaattgtcaagctagcaaaaaaactcttgtttttttaattgggagagaagagacctgccagattatcagacctcttcatgttaaaagaccatctcctgtaaaactgacctagtggacaagctgaatttgaaatagactgtgaagtaagctgtaacttgtcattttaattttgtttaacacggttactgacttagatgatgtattaaataccaagataaagaaaaatgcacctaaaatctaattagaattctctgggtcaacaagtcaaggtggtattgatctgtgttaatctgagtaacttattgcctagcctataaataaattccaaaatatccaattcatttcttcttg

SEQ ID NO: 164 - DNA, 419 bp, Artificial Sequence
  Description of Artificial sequences:primer
  misc_feature (1)..(419): 3' terminal sequence from clone image:141998. adenine phosphoribosyltransferase(APRT) gene.
  misc_feature (8)..(8): n is a, c, g, or t
  misc_feature (12)..(12): n is a, c, g, or t
  misc_feature (346)..(346): n is a, c, g, or t
  misc_feature (389)..(389): n is a, c, g, or t
tgggaaanttanttttactgcgttctcccgctgtgtgtaattgggttcagcgtggctgaaacacagctttgccccaggctttggcacttccagccccaggagaggcgctgaaccccagcaaaggaatgtgttccctgtgggcagccggtgcccctgggtcactgcagttgcccaaggctgaatatttccctgggatccagctggagatgttgggctgggaggcctgtggtcactcatactgcaggagagagaagaagggtacaggtgccagcttctccctgcccttaaggcgaggtcagctccaccagggcttcacgcactccagggacctcagcctgcagggggnccccagcagcttcaaaaggcagcgttcatgggttccaccagtnggccagcagattcaattccacgaaggacca

SEQ ID NO: 165 - DNA, 292 bp, Artificial Sequence
  Description of Artificial sequences:primer
  misc_feature (1)..(292): 5' terminal sequence from clone image:141998. adenine phosphoribosyltransferase(APRT) gene.
  misc_feature (48)..(48): n is a, c, g, or t
  misc_feature (250)..(250): n is a, c, g, or t
cgcaccggccatggcagcttccgagctgcagctggttgagcagcgganccgcagcttccccgacttccccaccccaggcgtggtattcagggacatctcgcccgtcctgaaggaccccgcctccttccgcgccgccatcggctcctggcgcgacacctgaaggcgacccacgggggccgcatcgactacatcgcaggcctagactcccgaggcttcctctttggcccctccctggcccaggagcttggantgggctgcgtgctcatccgaaagcgggggaagtgccaggccc

SEQ ID NO: 166 - DNA, 841 bp, Artificial Sequence
  Description of Artificial sequences:primer
  misc_feature (1)..(841): adenine phosphoribosyltransferase(APRT) gene.
acccctcgtggcggtcccgcccgtccccgcgcaggcgcgctcgggctgccgctggctcttcgcacgcggccatggccgactccgagctgcagctggttgagcagcggatccgcagcttccccgacttccccaccccaggcgtggtattcagggacatctcgcccgtcctgaaggaccccgcctccttccgcgccgccatcggcctcctggcgcgacacctgaaggcgacccacgggggccgcatcgactacatcgcaggcctagactcccgaggcttcctctttggcccctccctggcccaggagcttggactgggctgcgtgctcatccgaaagcgggggaagctgccaggccccactctgtgggcctcctattccctggagtacgggaaggctgagctggagattcagaaagacgccctggagccaggacagagggtggtcgtcgtggatgatctgctggccactggtggaaccatgaacgctgcctgtgagctgctgggccgcctgcaggctgaggtcctggagtgcgtgagcctggtggagctgacctcgcttaagggcagggagaagctggcacctgtacccttcttctctctcctgcagtatgagtgaccacagggcctcccagcccaacatctccagctggatcccagggaaatatcagccttgggcaactgcagtgaccaggggcaccggctgcccacagggaacacattcctttgctggggttcagcgcctctcctggggctggaagtgccaaagcctggggcaaagctgtgtttcagccacactgaacccaattacacacagcgggagaacgcagtaaacagctttcccac

SEQ ID NO: 167 - DNA, 489 bp, Artificial Sequence
  Description of Artificial sequences:primer
  misc_feature (1)..(489): 3' terminal sequence from clone image:1423050. transforming growth factor beta 1 induced transcript 1(TGFB1I1) gene.
gaacagtgagggtgcagggagcaaggacgtcctggcctggcctccgattcgctggaattgcaaggaccctcccccagtaagggggctccctcaagggtgggaatagagtggaggcccgcacgggagttcttgtctgtgtgcaatccactttgtgggcgtgtgggtttaggtctggctgggccgtttctgaacttgacccctgaggactcatagtaccttaggggcggggctctccagtgggtggggcctcccgctctgagagcaaggcctcggggtctggaggacccggcttttccgggagggcgcggcctccgggggagacggcgagccgagcgggctgtcagccgaagagcttcaggaagcagggctggcagtagggcttgcggcgcgctcctggaaggaccccttggtgagcgggcgcaggcagaaggtgcatgtgaagtggtccgggtggaagcggcgacccagggccgacacgcagcggccggt

SEQ ID NO: 168 - DNA, 1833 bp, Artificial Sequence
  Description of Artificial sequences:primer
  misc_feature (1)..(1833): transforming growth factor beta 1 induced transcript 1(TGFB1I1) gene.
ggcacgaggggagaataaaataatcaggaggctgggtttgtgcttggctccaagcatgccctgctctctgacctggagactaccacctcgcacatgccaaggtcaggggctcccaaagagcgccctgcggagcctctcacccctcccccatcctatggccaccagccacagacagggtctggggagtcttcaggagcctcgggggacaaggaccacctgtacagcacggtatgcaagcctcggtccccaaagcctgcagccccggcggcccctccattctcctcttccagcggtgtcttgggtaccgggctctgtgagctagatcggttgcttcaggaacttaatgccactcagttcaacatcacagatgaaatcatgtctcagttcccatctagcaaggtggcttcaggagagcagaaggaggaccagtctgaagataagaaaagacccagcctcccttccagcccgtctcctggcctcccaaaggcttctgccacctcagccactctggagctggatagactgatggcctcactctctgacttccgcgttcaaaaccatcttccagcctctgggccaactcagccaccggtggtgagctccacaaatgagggctccccatccccaccagagccgactggcaagggcagcctagacaccatgctggggctgctgcagtccgacctcagccgccggggtgttcccacccaggccaaaggcctctgtggctcctgcaataaacctattgctgggcaagtggtgacggctctgggccgcgcctggcaccccgagcacttcgtttgcggaggctgttccaccgccctgggaggcagcagcttcttcgagaaggatggagcccccttctgccccgagtgctactttgagcgcttctcgccaagatgtggcttctgcaaccagcccatccgacacaagatggtgaccgccttgggcactcactggcacccagagcatttctgctgcgtcagttgcggggagcccttcggagatgagggtttccacgagcgcgagggccgcccctactgccgccgggacttcctgcagctgttcgccccgcgctgccagggctgccagggccccatcctggataactacatctcggcgctcagcgcgctctggcacccggactgtttcgtctgcagggaatgcttcgcgcccttctcgggaggcagctttttcgagcacgagggccgcccgttgtgcgagaaccacttccacgcacgacgcggctcgctgtgcgccacgtgtggcctccctgtgaccggccgctgcgtgtcggccctgggtcgccgcttccacccggaccacttcacatgcaccttctgcctgcgcccgctcaccaaggggtccttccaggagcgcgccggcaagccctactgccagccctgcttcctgaagctcttcggctgacagcccgctcggctcgccctctcccccggaggccgcgccctcccggaaaagccgggtcctccagaccccgaggccttgctctcagagcgggaggccccacccactggagagccccgcccctaaggtactatgagttctcaggggtcaagttcagaaacggcccagccagacctaaacccacacgcccacaaagtggattgcacacagacaagaactcccgtgcgggcctccactctattcccacccttgagggagcccccttactgggggagggtccttgcaattccagcgaatcggaggccaggccaggacgtccttgctccctgcaccctcactgttctgtgcactttttctacctacataaacacacgcattccacctctaaaaaaaaaaaaaaaaaaaaaa

SEQ ID NO: 169 - DNA, 405 bp, Artificial Sequence
  Description of Artificial sequences:primer
  misc_feature (1)..(405): 3' terminal sequence from clone image:143519. fk506 binding protein 2, 13kda(FKBP2) gene.
  misc_feature (26)..(26): n is a, c, g, or t
  misc_feature (133)..(133): n is a, c, g, or t
  misc_feature (237)..(237): n is a, c, g, or t
  misc_feature (248)..(248): n is a, c, g, or t
  misc_feature (276)..(276): n is a, c, g, or t
  misc_feature (291)..(291): n is a, c, g, or t
  misc_feature (297)..(297): n is a, c, g, or t
  misc_feature (314)..(314): n is a, c, g, or t
  misc_feature (332)..(332): n is a, c, g, or t
  misc_feature (390)..(390): n is a, c, g, or t
ttgttttttttttggaacagtctggnccttgatgggggcctctccccctgcccctccccagtctggttacagctcagttcgtcgctctattttgagcagctccacctcgaacaccagggttgcaccgcctggnaatctttgggggagctccccgctctccataccctgttgaagatgcacaaagaaacagtcagtgatgggccaagctcccttccagtgtggggcaaagggagagtnttccgcccctntcagcaaggaagggccagaaatgggagnaagggtaatgggagnatgggnaaggggggtgccaaagncctggggcaaggggcagnagtgggggccacttacagctggagtgcttcaatgatatttgccccgtaactcactgtntaggacacagccaat

SEQ ID NO: 170 - DNA, 455 bp, Artificial Sequence
  Description of Artificial sequences:primer
  misc_feature (1)..(455): 5' terminal sequence from clone image:143519. fk506 binding protein 2, 13kda(FKBP2) gene.
  misc_feature (32)..(32): n is a, c, g, or t
  misc_feature (118)..(118): n is a, c, g, or t
  misc_feature (121)..(121): n is a, c, g, or t
  misc_feature (360)..(360): n is a, c, g, or t
  misc_feature (370)..(370): n is a, c, g, or t
  misc_feature (379)..(379): n is a, c, g, or t
  misc_feature (391)..(391): n is a, c, g, or t
  misc_feature (397)..(397): n is a, c, g, or t
  misc_feature (403)..(403): n is a, c, g, or t
  misc_feature (408)..(408): n is a, c, g, or t
  misc_feature (420)..(420): n is a, c, g, or t
  misc_feature (429)..(429): n is a, c, g, or t
  misc_feature (442)..(442): n is a, c, g, or t
  misc_feature (449)..(449): n is a, c, g, or t
  misc_feature (455)..(455): n is a, c, g, or t
gtttgacagcagcctgccccagaaccagcccnttgtcttctcccttggcacaggccaggtcatcaagggctgggaccaggggctgctggggatgtgtgagggggaaaagcgcaatggntgnatcccatccgagctaggtaagaggcccctcctgagggtgcagagcgagtttggggtgtgtgactgggaagggtgaaagctgcttcagttttcattggtcttcaccgtatccatttcattacaatacatgcctcctccaagtttgggctgtgtcttagcagttgagtacaggggcaatattcatttgaaggcactcagctgttagttggccccactcttgccctttgccagggccttttnggaacccccntttcccatnttccattaaccntttttncatttnttggncttttttgtttnagaaggggncggaacaattttnccttttncccatn

SEQ ID NO: 171 - DNA, 808 bp, Artificial Sequence
  Description of Artificial sequences:primer
  misc_feature (1)..(808): fk506 binding protein 2, 13kda(FKBP2) gene.
gccggaagtgacgcagggcagcggcgtcgcgggggcggggctcgggaaagacccgtgccagcgggcgtgtggccgcgggtttcgcacggtccaataagggagggcggcgtggcccggcctggtagcgacgaggacgcgcctgcgcagaggcggcagcaccaccggggttgactccgggggcgcggcgaggagagacatgaggctgagctggttccgggtcctgacagtactgtccatctgcctgagcgccgtggccacggccacgggggccgagggcaaaaggaagctgcagatcggggtcaagaagcgggtggaccactgtcccatcaaatcgcgcaaaggggatgtcctgcacatgcactacacggggaagctggaagatgggacagagtttgacagcagcctgccccagaaccagccctttgtcttctcccttggcacaggccaggtcatcaagggctgggaccaggggctgctggggatgtgtgagggggaaaagcgcaagctggtgatcccatccgagctagggtatggagagcggggagctcccccaaagattccaggcggtgcaaccctggtgttcgaggtggagctgctcaaaatagagcgacgaactgagctgtaaccagactggggaggggcagggggagaggcccccatcagggaccagactgttccaaaaaaaaaacaaaaaacaaaaacaaacaaaaaaacacttaaaagcccaaggagtaagcctgtgtgtttgtgggccctgagagactcagagacctcagctccagcataccccaccaccttctcctttccc

SEQ ID NO: 172 - DNA, 451 bp, Artificial Sequence
  Description of Artificial sequences:primer
  misc_feature (1)..(451): 3' terminal sequence from clone image:144853.
  misc_feature (315)..(315): n is a, c, g, or t
  misc_feature (383)..(383): n is a, c, g, or t
  misc_feature (391)..(391): n is a, c, g, or t
  misc_feature (406)..(406): n is a, c, g, or t
  misc_feature (418)..(418): n is a, c, g, or t
  misc_feature (427)..(427): n is a, c, g, or t
  misc_feature (444)..(444): n is a, c, g, or t
ttacccctcattgtcaaaaatatccaaacagccatagaggctcttgtggacagacggactaccacacgactaatggccctaactaagtattaacccctgccaagaaaagagctacttcctcttgaagtaaatgaagatagtgatgctttctcttaaactttacttataaaaagcatcaaaggggggaatgaagcaggaaatataaaaggaaaaacaagtaaagggaaaacaagtcctttcctgaccagtctgactcactccaaagtcctgctgggagctatggataattatctggcaggccagggcagggggctncgagggttgggggctccggggagcaggggatgagggaaaaacaagtttttccttattcagttttcccngtttttgnaattctttttccccntaacattattcntttggttcntggctttttaacaactntttttgg

SEQ ID NO: 173 - DNA, 323 bp, Artificial Sequence
  Description of Artificial sequences:primer
  misc_feature (1)..(323): 3' terminal sequence from clone image:145269. biliverdin reductase a(BLVRA) gene.
aaggaactgcctgatgtagtcctcatggctggagctctcactgcagatataggcgacctccacctcttggctggaaagagcatcctccaaagaaatctgctggactccatcaatgctcccgagctcccttctcgacacgaagccaatcaggttcaggaacgctgaggaagggtgtggattccgcaagtccctcatccgcacggagccggctcggccaacaccaaccaccaccacgccaaacttcctctcgggctctgtattcatcttgggtctcttccttcgggtcacttgacgcggggcaccttcttccgtggcagcctccg

SEQ ID NO: 174 - DNA, 271 bp, Artificial Sequence
  Description of Artificial sequences:primer
  misc_feature (1)..(271): 5' terminal sequence from clone image:145269. biliverdin reductase a(BLVRA) gene.
  misc_feature (123)..(123): n is a, c, g, or t
  misc_feature (126)..(126): n is a, c, g, or t
  misc_feature (192)..(192): n is a, c, g, or t
cccagggcacagaggccaggatctcacgcgcgaccgcacgaggccgggaccctccctccccttccgtccactcccttccccaccgcctccggtcccctcccggtctccgccaccccgcttcgngcnccccgcccccagccgggcagccaatcggagctgggatcccgccccggtccgcaaagccggtgggcnccggagctgcacggagagcggtgcccggttcagtgaccgaagaagagaccaagatgaatcacagagcccgagaggaagt

SEQ ID NO: 175 - DNA, 1070 bp, Artificial Sequence
  Description of Artificial sequences:primer
  misc_feature (1)..(1070): biliverdin reductase a(BLVRA) gene.
ggggtggcgcccggagctgcacggagagcgtgcccgtcagtgaccgaagaagagaccaagatgaatgcagagcccgagaggaagtttggcgtggtggtggttggtgttggccgagccggctccgtgcggatgagggacttgcggaatccacacccttcctcagcgttcctgaacctgattggcttcgtgtcgagaagggagctcgggagcattgatggagtccagcagatttctttggaggatgctctttccagccaagaggtggaggtcgcctatatctgcagtgagagctccagccatgaggactacatcaggcagttccttaatgctggcaagcacgtccttgtggaataccccatgacactgtcattggcggccgctcaggaactgtgggagctggctgagcagaaaggaaaagtcttgcacgaggagcatgttgaactcttgatggaggaattcgctttcctgaaaaaagaagtggtggggaaagacctgctgaaagggtcgctcctcttcacatctgacccgttggaagaagaccggtttggcttccctgcattcagcggcatctctcgactgacctggctggtctccctctttggggagctttctcttgtgtctgccactttggaagagcgaaaggaagatcagtatatgaaaatgacagtgtgtctggagacagagaagaaaagtccactgtcatggattgaagaaaaaggacctggtctaaaacgaaacagatatttaagcttccatttcaagtctgggtccttggagaatgtgccaaatgtaggagtgaataagaacatatttctgaaagatcaaaatatatttgtccagaaactcttgggccagttctctgagaaggaactggctgctgaaaagaaacgcatcctgcactgcctggggcttgcagaagaaatccagaaatattgctgttcaaggaagtaagaggaggaggtgatgtagcacttccaagatggcaccagcatttggttcttctcaagagttgaccattatctctattcttaaaattaaacatgttggggaaacaaaaaaaaaaaaaaaaa

SEQ ID NO: 176 - DNA, 343 bp, Artificial Sequence
  Description of Artificial sequences:primer
  misc_feature (1)..(343): 3' terminal sequence from clone image:145286. solute carrier family 30 (zinc transporter), member 5(SLC30A5) gene.
  misc_feature (7)..(8): n is a, c, g, or t
  misc_feature (127)..(127): n is a, c, g, or t
  misc_feature (291)..(291): n is a, c, g, or t
atatttnntattttggcctcgttttgttttattatttatttggttgtctgttttacttccagcaaagacttcaaaaatgtgattttcaaggaagaaagtagtgaagaaattacatacagtacctttnctaaagcaatatgtagttctttttcatattctggtggcaatctcaggagtagaacctgggcaggcatctttaatcagtggaacaacactgagaaatattaatatagcaataaaaagagaacagagtggggtcagcgatgaaccatccaaactgctctataaganctgtgggatacgatcacaccaatgctgccaagagtatctgccaaaacatgta

SEQ ID NO: 177 - DNA, 513 bp, Artificial Sequence
  Description of Artificial sequences:primer
  misc_feature (1)..(513): 5' terminal sequence from clone image:145286. solute carrier family 30 (zinc transporter), member 5(SLC30A5) gene.
  misc_feature (405)..(405): n is a, c, g, or t
  misc_feature (414)..(414): n is a, c, g, or t
  misc_feature (428)..(428): n is a, c, g, or t
  misc_feature (441)..(441): n is a, c, g, or t
  misc_feature (468)..(468): n is a, c, g, or t
  misc_feature (483)..(483): n is a, c, g, or t
  misc_feature (501)..(501): n is a, c, g, or t
gaatcactaaaacaaattcttgaggagagtgactctaggcagatcttttacttcttgtgcttgaatctgctttttacctttgtggaattattctatggcgtgctgaccaatagtctgggcctgatctcggatggattccacatgctttttgactgctctgctttagtcatgggactttttgctgccctgatgagtaggtggaaagccactcggattttctcctatgggtacggccgaatagaaattctgtctggatttattaatggactttttctaatagtaatagcgttttttgtgtttatgggagtcagtggctagattgattgatcctccagaattaggacactcacatgttaacaccagtcttcagttgggaggggctgatagttaaaccttattgggtanctgtggccnttagccatgccccntaggccatgcccngggagcttctcaagggaaggtgttcantcatctgatcacagnccttcacatcatatggcnggggcacagtga

SEQ ID NO: 178 - DNA, 2952 bp, Artificial Sequence
  Description of Artificial sequences:primer
  misc_feature (1)..(2952): solute carrier family 30 (zinc transporter), member 5(SLC30A5) gene.
aactgatcgcggcctagtcccgacgcgtgtgtgctagtgagccggagccggcgacggcggcagtggcggcccggcctgcaggagcccgacggggtctctgccatgggggagtgacgcgcctgcacccgctgttccgcggcagcggcgagacatgaggagaccccgcgacaggggcagcggcggcggctcgtgagccccgggatggaggagaaatacggcggggacgtgctggccggccccggcggcggcggcggccttgggccggtggacgtacccagcgctcgattaacaaaatatattgtgttactatgtttcactaaatttttgaaggctgtgggacttttcgaatcatatgatctcctaaaagctgttcacattgttcagttcatttttatattaaaacttgggactgcattttttatggttttgtttcaaaagccattttcttctgggaaaactattaccaaacaccagtggatcaaaatatttaaacatgcagttgctgggtgtattatttcactcttgtggttttttggcctcactctttgtggaccactaaggactttgctgctatttgagcacagtgatattgttgtcatttcactactcagtgttttgttcaccagttctggaggaggaccagcaaagacaaggggagctgcttttttcattattgctgtgatctgtttattgctttttgacaatgatgatctcatggctaaaatggctgaacaccctgaaggacatcatgacagtgctctaactcatatgctttacacagccattgccttcttaggtgtggcagatcacaagggtggagtattattgctagtactggctttgtgttgtaaagttggttttcatacagcttccagaaagctctctgtcgacgttggtggagctaaacgtcttcaagctttatctcatcttgtttctgtgcttctcttgtgcccatgggtcattgttctttctgtgacaactgagagtaaagtggagtcttggttttctctcattatgccttttgcaacggttatcttttttgtcatgatcctggatttctacgtggattccatttgttcagtcaaaatggaagtttccaaatgtgctcgttatggatcctttcccatttttattagtgctctcctttttggaaatttttggacacatccaataacagaccagcttcgggctatgaacaaagcagcacaccaggagagcactgaacacgtcctgtctggaggagtggtagtgagtgctatattcttcattttgtctgccaatatcttatcatctccctctaagagaggacaaaaaggtacccttattggatattctcctgaaggaacacctctttataacttcatgggtgatgcttttcagcatagctctcaatcgatccctaggtttattaaggaatcactaaaacaaattcttgaggagagtgactctaggcagatcttttacttcttgtgcttgaatctgctttttacctttgtggaattattctatggcgtgctgaccaatagtctgggcctgatctcggatggattccacatgctttttgactgctctgctttagtcatgggactttttgctgccctgatgagtaggtggaaagccactcggattttctcctatgggtacggccgaatagaaattctgtctggatttattaatggactttttctaatagtaatagcgttttttgtgtttatggagtcagtggctagattgattgatcctccagaattagacactcacatgttaacaccagtctcagttggagggctgatagtaaaccttattggtatctgtgcctttagccatgcccatagccatgcccatggagcttctcaaggaagctgtcactcatctgatcacagccattcacaccatatgcatggacacagtgaccatgggcatggtcacagccacggatctgcgggtggaggcatgaatgctaacatgaggggtgtatttctacatgttttggcagatactcttggcagcattggtgtgatcgtatccacagttcttatagagcagtttggatggttcatcgctgacccactctgttctctttttattgctatattaatatttctcagtgttgttccactgattaaagatgcctgccaggttctactcctgagattgccaccagaatatgaaaaagaactacatattgctttagaaaagatacagaaaattgaaggattaatatcataccgagaccctcatttttggcgtcattctgctagtattgtggcaggaacaattcatatacaggtgacatctgatgtgctagaacaaagaatagtacagcaggttacaggaatacttaaagatgctggagtaaacaatttaacaattcaagtggaaaaggaggcatactttcaacatatgtctggcctaagtactggatttcatgatgttctggctatgacaaaacaaatggaatccatgaaatactgcaaagatggtacttacatcatgtgagataactcaagaattacccctggagaataaacaatgaagattaaatgactcagtatttgtaatattgccagaaggataaaaattacacattaactgtacagaaacagagttccctactactggatcaaggaatctttcttgaaggaaatttaaatacagaatgaaacattaatggtaaaagtggagtaattatttaaattatgtgtataaaaggaatcaaattttgagtaaacatgatgtattacatcatcttcgaaaatagatatgatggattctagtgaagaccaaaattacttctgtttactttctatcaggaagcatctccattgtaaatatgtatttacatgtttattacaaagacccaaatgaaaaatttttagtccattttttgcatagcctaaagataaaataggaataaaagttctatatttatggaaaaaaaaaaaaaaaaaa

SEQ ID NO: 179 - DNA, 578 bp, Artificial Sequence
  Description of Artificial sequences:primer
  misc_feature (1)..(578): 3' terminal sequence from clone image:1456160. alpha-2-glycoprotein 1, zinc(AZGP1) gene.
tttatgctaggcaaggagggatgattatttattagcttctacagattagacaatggggtgggggtgggctcaaggtgagatgattttttgggtccaagtctactcaagacaggcatcccagtcttcggtctccaaatccacctcctgtctgtccccccacactgctcctcaggccttgtggatccattgactgtgatttctgtggttcagctcccacatcaggcaggaagggcagctactgggtctgagatcccacattgcctccaacccttgcttcctagctggcctcccagggcaccacgaggggctgggccaggctgctgtgctgcacgtggcaggagtagggggctgtgtcctgcgggggcactgcaccaccacccaggactggtaagtgccatttccattgtgaagaacatctcccgtactcaggctcctgcacctcgcggcccgagtccagtgcacatcaatttccctgggtagaagtcgtaggccagcacttcagtttcttcttttctcctgggggctggtggctggtgacaccacagagggaggatctgccggtccaggatatttttgct

SEQ ID NO: 180 - DNA, 897 bp, Artificial Sequence
  Description of Artificial sequences:primer
  misc_feature (1)..(897): alpha-2-glycoprotein 1, zinc(AZGP1) gene.
atggtaagaatggtgcctgtcctgctgtctctgctgctgcttctgggtcctgctgtcccccaggagaaccaagatggtcgttactctctgacctatatctacactgggctgtccaagcatgttgaagacgtccccgcgtttcaggcccttggctcactcaatgacctccagttctttagatacaacagtaaagacaggaagtctcagcccatgggactctggagacaggtggaaggaatggaggattggaagcaggacagccaacttcagaaggccagggaggacatctttatggagaccctgaaagacattgtggagtattacaacgacagtaacgggtctcacgtattgcagggaaggtttggttgtgagatcgagaataacagaagcagcggagcattctggaaatattactatgatggaaaggactacattgaattcaacaaagaaatcccagcctgggtccccttcgacccagcagcccagataaccaagcagaagtgggaggcagaaccagtctacgtgcagcgggccaaggcttacctggaggaggagtgccctgcgactctgcggaaatacctgaaatacagcaaaaatatcctggaccggcaagatcctccctctgtggtggtcaccagccaccaggccccaggagaaaagaagaaactgaagtgcctggcctacgacttctacccagggaaaattgatgtgcactggactcgggccggcgaggtgcaggagcctgagttacggggagatgttcttcacaatggaaatggcacttaccagtcctgggtggtggtggcagtgcccccgcaggacacagccccctactcctgccacgtgcagcacagcagcctggcccagcccctcgtggtgccctgggaggccagctag

SEQ ID NO: 181 - DNA, 367 bp, Artificial Sequence
  Description of Artificial sequences:primer
  misc_feature (1)..(367): 3' terminal sequence from clone image:1456315. homo sapiens cdna flj30452 fis, clone brace2009293..
ggaaagaacagtttgtgctgtgctttattaaaatgtgcatcattcttttattttaaaatgtgcatcattgtctcgtgctcggcgcatgcgacctacagcgtggtggaccgctgggggctcgatatacccgcccagctcccgcggcgcgacagggagcaggacgcactcacgtggcgcgggaccgggggtcccgcccataggcgaggtagacgtcgatgggcacgtgcagcagcgtcaggcagtggcatccagggcagcgacgaagcggcctgaccgggttgtgctccgtcgctaccgcctccgggctgtcctgggactcgggggcggcggcaaggcacgggagtctccggcctcaatggggaatctc

SEQ ID NO: 182 - DNA, 388 bp, Artificial Sequence
  Description of Artificial sequences:primer
  misc_feature (1)..(388): 5' terminal sequence from clone image:145696. killer cell lectin-like receptor subfamily d, member 1(KLRD1) gene.
  misc_feature (367)..(367): n is a, c, g, or t
ggattctttaatctccagctcagcttcaacaattcaacgctgttctttctgaaaaagtacacatcgtgccttctctacttcgctcttggaacataatttctcatggcagcttttactaaactgagtattgagccagcatttactccaggacccaacatagaactccagaaagactctgactgctgttcttgccaagaaaaatgggttgggtaccggtgcaactgttacttcatttccatgaacagaaaacttggaacgaaagtcggcatctctgtgcttctcagaaatccagcctgcttcagcttcaaaacacagatgaactgggattttatgagctccagtccaacaattttactgggattgggantctcttacagtgaggggcaca

SEQ ID NO: 183 - DNA, 1364 bp, Artificial Sequence
  Description of Artificial sequences:primer
  misc_feature (1)..(1364): killer cell lectin-like receptor subfamily d, member 1(KLRD1) gene.
ctgtattgtggttcctggaacactttagaggcttgtgattctactgcttcttattcacactataatacatgtctcaccaatagatgattcaagaacatcatttaaatacacaatttttcattctctatttttgctaaatttcttcatactcaactttcagattctttaatctccagctcagcttcaacaattcaacgctgttctttctgaaaaagtacacatcgtgccttctctacttcgctcttggaacataatttctcatggcagtgtttaagaccactctgtggaggttaatttctgggaccttagggataatatgcctttcgttgatggctacgttgggaattttgttgaaaaattcttttactaaactgagtattgagccagcatttactccaggacccaacatagaactccagaaagactctgactgctgttcttgccaagaaaaatgggttgggtaccggtgcaactgttacttcatttccagtgaacagaaaacttggaacgaaagtcggcatctctgtgcttctcagaaatccagcctgcttcagcttcaaaacacagatgaactggattttatgagctccagtcaacaattttactggattggactctcttacagtgaggagcacaccgcctggttgtgggagaatggctctgcactctcccagtatctatttccatcatttgaaacttttaatacaaagaactgcatagcgtataatccaaatggaaatgctttagatgaatcctgtgaagataaaaatcgttatatctgtaagcaacagctcatttaaatgtttcttggggcagagaaggtggagagtaaagacccaacattactaacaatgatacagttgcatgttatattattactaattgtctacttctggagtctataaaatgtttttaaacagtgtcatatacaattgtcatgtatgtgaaacaatgtgttttaaaattgatgaaattcgttcacctacatttgagaattataaaattaacataaagaattttgtattttcatttaatgtatataatgttaaattcaatgtagttttattacacatttatgtaattttatttacattcttgctaattctcagcagaaatttaaataagatttaattcacatcaaataaaatttagaaaataaaatttaactcacactgcccaggctggagcatagtggcaagatcatagctcattgcaagctcaagtgatcctcctgactcagcctcccaagtagctaggactgcaggcaccatgtcactatgcccgactaatttttaatttttaattttttgtcaagacaaggtcttgctatgttgcccaggctggtcttgaactcctggcctcaa

SEQ ID NO: 184 - DNA, 446 bp, Artificial Sequence
  Description of Artificial sequences:primer
  misc_feature (1)..(446): 3' terminal sequence from clone image:146494. folate receptor 2 (fetal)(FOLR2) gene.
  misc_feature (212)..(212): n is a, c, g, or t
  misc_feature (214)..(214): n is a, c, g, or t
  misc_feature (352)..(352): n is a, c, g, or t
  misc_feature (430)..(430): n is a, c, g, or t
tccagaggccttcacaaagggcagctggagtggggaagtaggactcaaaggtgcggcagagagccccagctgggcacttgttaactcctgaggtccagtcccatcctctgtgccagttgctcttgcacgtgtgggaggtgtgacaatcctcccaccagcgctgacagtcctctttgcataagggcacatccaggaagcgttctttgcgccantnctgattcacctgctggatccagggccccaggttgggtgagcactcatagagacaggtgtcctggatgaagtggcgcttgcaggcgggctccatcttgccgcagtggtcccagttaaagttgtacaggcgggaggtgtncttgtgcagcttcctgggtggtgctggctgtgcagcaggcatttcttcttccagggactgcattggtcatgcagcttntcctcaggacctggtt

SEQ ID NO: 185 - DNA, 462 bp, Artificial Sequence
  Description of Artificial sequences:primer
  misc_feature (1)..(462): 5' terminal sequence from clone image:146494. folate receptor 2 (fetal)(FOLR2) gene.
  misc_feature (421)..(421): n is a, c, g, or t
  misc_feature (435)..(435): n is a, c, g, or t
caaaactacttaaaaaacactgctctttccatttccgtatcatttaaccaaacaccatcctgtgggttctgtcacttgatcctcatgctgatctgagaactcggcagactgggtcactgccttccccaaggctaacctggtttctaagctggcacaagaccccaggtgatctatcatctaaccacagagcccttgctggacagagggtgaagacattatgtgtccctggctctgttcagggaagcagaggatagacctgaagaatttaattacttgtcatagataaagcctagagaaaaggtgagggcgcaaagtatctcctccaaattgggaagactcccccagggcttcactcacttaacgccattcttcctggagccttttaaagcctggggggtgagggagccttccgggtcaaccntttttaccttagcntcagggagctttcagggccccagcatt

SEQ ID NO: 186 - DNA, 1119 bp, Artificial Sequence
  Description of Artificial sequences:primer
  misc_feature (1)..(1119): folate receptor 2 (fetal)(FOLR2) gene.
gcgttgtctaccctgtaccgaagacagaggctgtggggacagcctaggggcctggatctattgcctacttagagagaggccaactcagacacagccgtgtatgctcccagcagcaacggaggttcagctccgcctgcagggacagaaagacatggtctggaaatggatgccacttctgctgcttctggtctgtgtagccaccatgtgcagtgcccaggacaggactgatctcctcaatgtctgtatggatgccaagcaccacaagacaaagccaggtcctgaggacaagctgcatgaccaatgcagtccctggaagaagaatgcctgctgcacagccagcaccagccaggagctgcacaaggacacctcccgcctgtacaactttaactgggaccactgcggcaagatggagcccgcctgcaagcgccacttcatccaggacacctgtctctatgagtgctcacccaacctggggccctggatccagcaggtgaatcagacgtggcgaaaagaacgcttcctggatgtgcccttatgcaaagaggactgtcagcgctggtgggaggattgtcacacctcccacacgtgcaagagcaactggcacagaggatgggactggacctcaggagttaacaagtgcccagctggggctctctgccgcacctttgagtcctacttccccactccagctgccctttgtgaaggcctctggagtcactcatacaaggtcagcaactacagccgagggagcggccgctgcatccagatgtggtttgattcagcccagggcaaccccaacgaggaagtggcgaggttctatgctgcagccatgcatgtgaatgctggtgagatgcttcatgggactgggggtctcctgctcagtctggccctgatgctgcaactctggctccttggctgagttcagtcctcccagactacctgccctcagcttggataaccaggctgggctcagctcagctcccacaaatgacagccccttaagcatgcttctattagtcacctaaccctctgtcacccagtctgttgctgctccatggtggggccaagagtcacttctaataaacagactgttttctaataaaaaaaaaaaaaaaaaaa

SEQ ID NO: 187 - DNA, 371 bp, Artificial Sequence
  Description of Artificial sequences:primer
  misc_feature (1)..(371): 3' terminal sequence from clone image:146922.
  misc_feature (34)..(34): n is a, c, g, or t
  misc_feature (41)..(41): n is a, c, g, or t
  misc_feature (78)..(78): n is a, c, g, or t
  misc_feature (204)..(204): n is a, c, g, or t
  misc_feature (334)..(334): n is a, c, g, or t
  misc_feature (358)..(358): n is a, c, g, or t
cattctttacaacaagcagtacaacaaagacatnccccttnctatattactcatatgagagcacatactaacctcccngggccttttaacttaatcaaagggcggatgcactggtttctgcagcttttgccgatgcacaaacgttccattccttaacccatcttaatgctgcaggcctcagaaaaagatacggcttatccgggnaggcaggttaaggagattgtaaaacacttttctgccgggtgaagtcctggcatctgccacatcaggggaggcagggagtttaaccctaggagggttttatctccaaatttccatctgttcaggatggggncattaacacacatttcccattttnggggaattggtcc

SEQ ID NO: 188 - DNA, 356 bp, Artificial Sequence
  Description of Artificial sequences:primer
  misc_feature (1)..(356): 5' terminal sequence from clone image:146922.
  misc_feature (351)..(351): n is a, c, g, or t
aaaaaaaaaaaaaaaaaaaaaaaaatgcagccatggctttgctgcaatactctgggccattatcggttttggttttttctgggattcccataactgcaaagcaaaaaaaaggttttttaacatgagctgtagcttcccctgtttgatatgtggcccagataaaatgtgaataaatatctactgaaacatgaacaaaggacaattttccaaaagtggggaatgtgtgttatgtccatctgacagatgggaatttgggagataggacctctaggggtttaactcctgctccctggatgttggccagatgcagggactttcaccgggcaggaaaagtgtttttacaatcttccnttaac

SEQ ID NO: 189 - DNA, 228 bp, Artificial Sequence
  Description of Artificial sequences:primer
  misc_feature (1)..(228): 3' terminal sequence from clone image:147050. prostaglandin-endoperoxide synthase 2 (prostaglandin g/h synthase and cyclooxygenase)(PTGS2) gene.
  misc_feature (103)..(103): n is a, c, g, or t
  misc_feature (116)..(116): n is a, c, g, or t
aaaataaacagacatttatttccagacttatcttttacataagttaaatacacatttgtctgaggcactgaaacattcacatacacaacccaaattcccaggntttgtcagcagancaatgttaataacaaatcaagtttttttttaaaaaaaacagtgaacagtgttttatacaagcatattgactatttctttcttaaccttaaacattctaaacgtaaaattgta

SEQ ID NO: 190 - DNA, 408 bp, Artificial Sequence
  Description of Artificial sequences:primer
  misc_feature (1)..(408): 5' terminal sequence from clone image:147050. prostaglandin-endoperoxide synthase 2 (prostaglandin g/h synthase and cyclooxygenase)(PTGS2) gene.
gtttaagcctacaatcattgattttttttttgttatgtcacaatcagtatattttctttggggttacctctctgaatattatgtaaacaatccaaagaaatgattgtattaagatttgtgaataaatttttagaaatctgattggcatattgagatatttaaggttgaatgtttgtccttaggataggcctatgtgctagcccacaaagaatattgtctcattagcctgaatgtgccataagactgaccttttaaaatgttttgagggatctgtggatgcttcgttaatttgttcagccacaatttattgagaaaatattctgtgtcaagcactgtgggttttaatatttttaaatcaaacgctgattacagataatagtattttatataaataaattgaaaaaaatt

SEQ ID NO: 191 - DNA, 4465 bp, Artificial Sequence
  Description of Artificial sequences:primer
  misc_feature (1)..(4465): prostaglandin-endoperoxide synthase 2 (prostaglandin g/h synthase and cyclooxygenase)(PTGS2) gene.
caattgtcatacgacttgcagtgagcgtcaggagcacgtccaggaactcctcagcagcgcctccttcagctccacagccagacgccctcagacagcaaagcctacccccgcgccgcgccctgcccgccgctcggatgctcgcccgcgccctgctgctgtgcgcggtcctggcgctcagccatacagcaaatccttgctgttcccacccatgtcaaaaccgaggtgtatgtatgagtgtgggatttgaccagtataagtgcgattgtacccggacaggattctatggagaaaactgctcaacaccggaatttttgacaagaataaaattatttctgaaacccactccaaacacagtgcactacatacttacccacttcaagggattttggaacgttgtgaataacattcccttccttcgaaatgcaattatgagttatgtcttgacatccagatcacatttgattgacagtccaccaacttacaatgctgactatggctacaaaagctgggaagccttctctaacctctcctattatactagagcccttcctcctgtgcctgatgattgcccgactcccttgggtgtcaaaggtaaaaagcagcttcctgattcaaatgagattgtggaaaaattgcttctaagaagaaagttcatccctgatccccagggctcaaacatgatgtttgcattctttgcccagcacttcacgcatcagtttttcaagacagatcataagcgagggccagctttcaccaacgggctgggccatggggtggacttaaatcatatttacggtgaaactctggctagacagcgtaaactgcgccttttcaaggatggaaaaatgaaatatcagataattgatggagagatgtatcctcccacagtcaaagatactcaggcagagatgatctaccctcctcaagtccctgagcatctacggtttgctgtggggcaggaggtctttggtctggtgcctggtctgatgatgtatgccacaatctggctgcgggaacacaacagagtatgcgatgtgcttaaacaggagcatcctgaatggggtgatgagcagttgttccagacaagcaggctaatactgataggagagactattaagattgtgattgaagattatgtgcaacacttgagtggctatcacttcaaactgaaatttgacccagaactacttttcaacaaacaattccagtaccaaaatcgtattgctgctgaatttaacaccctctatcactggcatccccttctgcctgacacctttcaaattcatgaccagaaatacaactatcaacagtttatctacaacaactctatattgctggaacatggaattacccagtttgttgaatcattcaccaggcaaattgctggcagggttgctggtggtaggaatgttccacccgcagtacagaaagtatcacaggcttccattgaccagagcaggcagatgaaataccagtcttttaatgagtaccgcaaacgctttatgctgaagccctatgaatcatttgaagaacttacaggagaaaaggaaatgtctgcagagttggaagcactctatggtgacatcgatgctgtggagctgtatcctgcccttctggtagaaaagcctcggccagatgccatctttggtgaaaccatggtagaagttggagcaccattctccttgaaaggacttatgggtaatgttatatgttctcctgcctactggaagccaagcacttttggtggagaagtgggttttcaaatcatcaacactgcctcaattcagtctctcatctgcaataacgtgaagggctgtccctttacttcattcagtgttccagatccagagctcattaaaacagtcaccatcaatgcaagttcttcccgctccggactagatgatatcaatcccacagtactactaaaagaacgttcgactgaactgtagaagtctaatgatcatatttatttatttatatgaaccatgtctattaatttaattatttaataatatttatattaaactccttatgttacttaacatcttctgtaacagaagtcagtactcctgttgcggagaaaggagtcatacttgtgaagacttttatgtcactactctaaagattttgctgttgctgttaagtttggaaaacagtttttattctgttttataaaccagagagaaatgagttttgacgtctttttacttgaatttcaacttatattataagaacgaaagtaaagatgtttgaatacttaaacactatcacaagatggcaaaatgctgaaagtttttacactgtcgatgtttccaatgcatcttccatgatgcattagaagtaactaatgtttgaaattttaaagtacttttggttatttttctgtcatcaaacaaaaacaggtatcagtgcattattaaatgaatatttaaattagacattaccagtaatttcatgtctactttttaaaatcagcaatgaaacaataatttgaaatttctaaattcatagggtagaatcacctgtaaaagcttgtttgatttcttaaagttattaaacttgtacatataccaaaaagaagctgtcttggatttaaatctgtaaaatcagatgaaattttactacaattgcttgttaaaatattttataagtgatgttcctttttcaccaagagtataaacctttttagtgtgactgttaaaacttccttttaaatcaaaatgccaaatttattaaggtggtggagccactgcagtgttatctcaaaataagaatattttgttgagatattccagaatttgtttatatggctggtaacatgtaaaatctatatcagcaaaagggtctacctttaaaataagcaataacaaagaagaaaaccaaattattgttcaaatttaggtttaaacttttgaagcaaacttttttttatccttgtgcactgcaggcctggtactcagattttgctatgaggttaatgaagtaccaagctgtgcttgaataacgatatgttttctcagattttctgttgtacagtttaatttagcagtccatatcacattgcaaaagtagcaatgacctcataaaatacctcttcaaaatgcttaaattcatttcacacattaattttatctcagtcttgaagccaattcagtaggtgcattggaatcaagcctggctacctgcatgctgttccttttcttttcttcttttagccattttgctaagagacacagtcttctcatcacttcgtttctcctattttgttttactagttttaagatcagagttcactttctttggactctgcctatattttcttacctgaacttttgcaagttttcaggtaaacctcagctcaggactgctatttagctcctcttaagaagattaaaagagaaaaaaaaaggcccttttaaaaatagtatacacttattttaagtgaaaagcagagaattttatttatagctaattttagctatctgtaaccaagatggatgcaaagaggctagtgcctcagagagaactgtacggggtttgtgactggaaaaagttacgttcccattctaattaatgccctttcttatttaaaaacaaaaccaaatgatatctaagtagttctcagcaataataataatgacgataatacttcttttccacatctcattgtcactgacatttaatggtactgtatattacttaatttattgaagattattatttatgtcttattaggacactatggttataaactgtgtttaagcctacaatcattgatttttttttgttatgtcacaatcagtatattttctttggggttacctctctgaatattatgtaaacaatccaaagaaatgattgtattaagatttgtgaataaatttttagaaatctgattggcatattgagatatttaaggttgaatgtttgtccttaggataggcctatgtgctagcccacaaagaatattgtctcattagcctgaatgtgccataagactgaccttttaaaatgttttgagggatctgtggatgcttcgttaatttgttcagccacaatttattgagaaaatattctgtgtcaagcactgtgggttttaatatttttaaatcaaacgctgattacagataatagtatttatataaataattgaaaaaaattttcttttgggaagagggagaaaatgaaataaatatcattaaagataactcaggagaatcttctttacaattttacgtttagaatgtttaaggttaagaaagaaatagtcaatatgcttgtataaaacactgttcactgttttttttaaaaaaaaaacttgatttgttattaacattgatctgctgacaaaacctgggaatttgggttgtgtatgcgaatgtttcagtgcctcagacaaatgtgtatttaacttatgtaaaagataagtctggaaataaatgtctgtttatttttgtactattta

SEQ ID NO: 192 - DNA, 410 bp, Artificial Sequence
  Description of Artificial sequences:primer
  misc_feature (1)..(410): 3' terminal sequence from clone image:147341. platelet/endothelial cell adhesion molecule (cd31 antigen)(PECAM1) gene.
  misc_feature (13)..(13): n is a, c, g, or t
  misc_feature (315)..(315): n is a, c, g, or t
  misc_feature (375)..(375): n is a, c, g, or t
  misc_feature (387)..(387): n is a, c, g, or t
caaagttttaaangtcaaatttatttaatacaacatccacgagggtccctgcagctgtgtcactgaggcaaacaggaaaagtgattttggctaggcgtggttctcatctgtgaaattccacagcgcaatgacagcaacctctctcccacccactcaagacactgtcaggaatgtcttaagacctcaggagaccacttctttagcaagcaattttgttttttgtctttttttgagatggattctcactctgtcactcaggctggagtgcagtggcgcgatctccgctcactacaacctccgtttcctggggttcangcgataatctcacctcagcctcttgagtagctgatactacagggcatgcggcaccacggnccggctaaattncttgtatttttagtaggagaaag

SEQ ID NO: 193 - DNA, 3189 bp, Artificial Sequence
  Description of Artificial sequences:primer
  misc_feature (1)..(3189): platelet/endothelial cell adhesion molecule (cd31 antigen)(PECAM1) gene.
tttccagccatggctgccattacctgaccagcgccacagccggtctctctgcaggcgccgggagaagtgaccagagcaatttctgcttttcacagggcgggtttctcaacggtgacttgtgggcagtgccttctgctgagcgagtcatggcccgaaggcagaactaactgtgcctgcagtcttcactctcaggatgcagccgaggtgggcccaaggggccacgatgtggcttggagtcctgctgacccttctgctctgttcaagccttgagggtcaagaaaactctttcacaatcaacagtgttgacatgaagagcctgccggactggacggtgcaaaatgggaagaacctgaccctgcagtgcttcgcggatgtcagcaccacctctcacgtcaagcctcagcaccagatgctgttctataaggatgacgtgctgttttacaacatctcctccatgaagagcacagagagttattttattcctgaagtccggatctatgactcagggacatataaatgtactgtgattgtgaacaacaaagagaaaaccactgcagagtaccaggtgttggtggaaggagtgcccagtcccagggtgacactggacaagaaagaggccatccaaggtgggatcgtgagggtcaactgttctgtcccagaggaaaaggccccaatacacttcacaattgaaaaacttgaactaaatgaaaaaatggtcaagctgaaaagagagaagaattctcgagaccagaattttgtgatactggaattccccgttgaggaacaggaccgcgttttatccttccgatgtcaagctaggatcatttctgggatccatatgcagacctcagaatctaccaagagtgaactggtcaccgtgacggaatccttctctacacccaagttccacatcagccccaccggaatgatcatggaaggagctcagctccacattaagtgcaccattcaagtgactcacctggcccaggagtttccagaaatcataattcagaaggacaaggcgattgtggcccacaacagacatggcaacaaggctgtgtactcagtcatggccatggtggagcacagtggcaactacacgtgcaaagtggagtccagccgcatatccaaggtcagcagcatcgtggtcaacataacagaactattttccaagcccgaactggaatcttccttcacacatctggaccaaggtgaaagactgaacctgtcctgctccatcccaggagcacctccagccaacttcaccatccagaaggaagatacgattgtgtcacagactcaagatttcaccaagatagcctcaaagtcggacagtgggacgtatatctgcactgcaggtattgacaaagtggtcaagaaaagcaacacagtccagatagtcgtatgtgaaatgctctcccagcccaggatttcttatgatgcccagtttgaggtcataaaaggacagaccatcgaagtccgttgcgaatcgatcagtggaactttgcctatttcttaccaacttttaaaaacaagtaaagttttggagaatagtaccaagaactcaaatgatcctgcggtattcaaagacaaccccactgaagacgtcgaataccagtgtgttgcagataattgccattcccacgccaaaatgttaagtgaggttctgagggtgaaggtgatagccccggtggatgaggtccagatttctatcctgtcaagtaaggtggtggagtctggagaggacattgtgctgcaatgtgctgtgaatgaaggatctggtcccatcacctataagttttacagagaaaaagagggcaaacccttctatcaaatgacctcaaatgccacccaggcattttggaccaagcagaaggctaacaaggaacaggagggagagtattactgcacagccttcaacagagccaaccacgcctccagtgtccccagaagcaaaatactgacagtcagagtcattcttgccccatggaagaaaggacttattgcagtggttatcatcggagtgatcattgctctcttgatcattgcggccaaatgttattttctgaggaaagccaaggccaagcagatgccagtggaaatgtccaggccagcagtaccacttctgaactccaacaacgagaaaatgtcagatcccaatatggaagctaacagtcattacggtcacaatgacgatgtcggaaaccatgcaatgaaaccaataaatgataataaagagcctctgaactcagacgtgcagtacacggaagttcaagtgtcctcagctgagtctcacaaagatctaggaaagaaggacacagagacagtgtacagtgaagtccggaaagctgtccctgatgccgtggaaagcagatactctagaacggaaggctcccttgatggaacttagacagcaaggccagatgcacatccctggaaggacatccatgttccgagaagaacagatgatccctgtatttcaagacctctgtgcacttatttatgaacctgccctgctcccacagaacacagcaattcctcaggctaagctgccggttcttaaatccatcctgctaagttaatgttgggtagaaagagatacagaggggctgttgaatttcccacatacactccttccaccaagttggaacatccttggaaattggaagagcacaagaggagatccagggcaaggccattgggatattctgaaacttgaatattttgttttgtgcagagataaagaccttttccatgcaccctcatacacagaaaccaattttcttttttatactcaatcatttctagcgcatggcctggttagaggctggttttttctcttttcctttggtccttcaaaggcttgtagttttgggtagtccttgttctttggaaatacacagtgctgaccagacagcctccccctgtcccctctatgacctcgccctccacaaatgggaaaaccagactacttgggagcaccgcctgtgaaataccaacctgaagacacggttcattcaggcaacgcacaaaacagaaaatgaaggtggaacaagcacagatgttcttcaactgtttttgtctacactctttctcttttcctctaccatgctgaaggctgaaagacaggaagatggtgccatcagcaaatattattcttaattgaaaacttgaaaaaaaaaaaaaaaa

SEQ ID NO: 194 - DNA, 440 bp, Artificial Sequence
  Description of Artificial sequences:primer
  misc_feature (1)..(440): 3' terminal sequence from clone image:147495. presenilin 1 (alzheimer disease 3)(PSEN1) gene.
  misc_feature (308)..(308): n is a, c, g, or t
  misc_feature (398)..(398): n is a, c, g, or t
tttttactcttctttaattctaccgtctttgggcatacatctcatttgctgtggaagaaggtctgacagcagggctgacagcaccgattcataacacattcttttcatcatacaaagagtaagaccctagaataatgggaccatctgctaccacgacagagctgccttactggctgtagaaaaagactgcttgtgtgggagagaagaatgaggacagaggaggcatctggggcaagtgagcgtacaagtatgtctacaaattcagaatttggtggaaaatccaaatttgacttcaacatgatagaganttgatgagaaataggctgtactgtttccaaaatttactgaatttgggaacctgaggttaaaacttttagggtaaaggcaacctcaggttncagactgggccttggggaaggaaatgggcattcacagacggt

SEQ ID NO: 195 - DNA, 422 bp, Artificial Sequence
  Description of Artificial sequences:primer
  misc_feature (1)..(422): 5' terminal sequence from clone image:147495. presenilin 1 (alzheimer disease 3)(PSEN1) gene.
  misc_feature (408)..(408): n is a, c, g, or t
attcggcactaggggggttccagcttccctttgattttttgctgcagactcatcctttttaaatgagacttgttttcccctctctttgagtcaagtcaaatatgtagattgcctttggaatttcttcttctcaagcactgacactcattaccgtctgtgattgccatttcttcccaaggccagtctgaacctgaggttgctttatcctaaaagttttaacctcaggttccaaattcagtaaattttggaaacagtacagctatttctcatcaattctctatcatgttgaagtcaaatttgggattttccaccaaattctgaatttgtaggacatacttgtacggttcacttgccccagatgcctcctctgtcctcattcttcttctcccacacaagcagtcttttttntacagccagtaagg

SEQ ID NO: 196 - DNA, 3056 bp, Artificial Sequence
  Description of Artificial sequences:primer
  misc_feature (1)..(3056): presenilin 1 (alzheimer disease 3)(PSEN1) gene.
gaattcggcacgagggaaatgctgtttgctcgaagacgtctcagggcgcaggtgccttgggccgggattagtagccgtctgaactggagtggagtaggagaaagaggaagcgtcttgggctgggtctgcttgagcaactggtgaaactccgcgcctcacgccccgggtgtgtccttgtccaggggcgacgagcattctgggcgaagtccgcaccctcttgttcgaggcggaagacggggtctgatctttctccttggtcgggctgtctcgaggcatgcatgtccagtgactcttgtgtttgctgctgcttccctctcagattcttctcaccgttgtggtcagctctgctttaggcatattaatccatagtggaggctgggatgggtgagagaattgaggtgacttttccataattcagacctaatctgggagcctgcaagtgacaacagcctttgcggtccttagacagcttggcctggaggagaacacatgaaagaaagaacctcaagaggctttgttttctgtgaaacagtatttctatacagttgctccaatgacagagttacctgcaccgttgtcctacttccagaatgcacagatgtctgaggacaaccacctgagcaatactaatgacaatagagaacggcaggagcacaacgacagacggagccttggccaccctgagccattatctaatggacgaccccagggtaactcccggcaggtggtggagcaagatgaggaagaagatgaggagctgacattgaaatatggcgccaagcatgtgatcatgctctttgtccctgtgactctctgcatggtggtggtcgtggctaccattaagtcagtcagcttttatacccggaaggatgggcagctaatctataccccattcacagaagataccgagactgtgggccagagagccctgcactcaattctgaatgctgccatcatgatcagtgtcattgttgtcatgactatcctcctggtggttctgtataaatacaggtgctataaggtcatccatgcctggcttattatatcatctctattgttgctgttctttttttcattcatttacttgggggaagtgtttaaaacctataacgttgctgtggactacattactgttgcactcctgatctggaatttgggtgtggtgggaatgatttccattcactggaaaggtccacttcgactccagcaggcatatctcattatgattagtgccctcatggccctggtgtttatcaagtacctccctgaatggactgcgtggctcatcttggctgtgatttcagtatatgatttagtggctgttttgtgtccgaaaggtccacttcgtatgctggttgaaacagctcaggagagaaatgaaacgctttttccagctctcatttactcctcaacaatggtgtggttggtgaatatggcagaaggagacccggaagctcaaaggagagtatccaaaaattccaagtataatgcagaaagcacagaaagggagtcacaagacactgttgcagagaatgatgatggcgggttcagtgaggaatgggaagcccagagggacagtcatctagggcctcatcgctctacacctgagtcacgagctgctgtccaggaactttccagcagtatcctcgctggtgaagacccagaggaaaggggagtaaaacttggattgggagatttcattttctacagtgttctggttggtaaagcctcagcaacagccagtggagactggaacacaaccatagcctgtttcgtagccatattaattggtttgtgccttacattattactccttgccattttcaagaaagcattgccagctcttccaatctccatcacctttgggcttgttttctactttgccacagattatcttgtacagccttttatggaccaattagcattccatcaattttatatctagcatatttgcggttagaatcccatggatgtttcttctttgactataaccaaatctggggaggacaaaggtgattttcctgtgtccacatctaacaaagtcaagattcccggctggacttttgcagcttccttccaagtcttcctgaccaccttgcactattggactttggaaggaggtgcctatagaaaacgattttgaacatacttcatcgcagtggactgtgtcctcggtgcagaaactaccagatttgagggacgaggtcaaggagatatgataggcccggaagttgctgtgccccatcagcagcttgacgcgtggtcacaggacgatttcactgacactgcgaactctcaggactaccggttaccaagaggttaggtgaagtggtttaaaccaaacggaactcttcatcttaaactacacgttgaaaatcaacccaataattctgtattaactgaattctgaacttttcaggaggtactgtgaggaagagcaggcaccagcagcagaatggggaatggagaggtgggcaggggttccagcttccctttgattttttgctgcagactcatcctttttaaatgagacttgttttcccctctctttgagtcaagtcaaatatgtagatgcctttggcaattcttcttctcaagcactgacactcattaccgtctgtgattgccatttcttcccaaggccagtctgaacctgaggttgctttatcctaaaagttttaacctcaggttccaaattcagtaaattttggaaacagtacagctatttctcatcaattctctatcatgttgaagtcaaatttggattttccaccaaattctgaatttgtagacatacttgtacgctcacttgccccagatgcctcctctgtcctcattcttctctcccacacaagcagtctttttctacagccagtaaggcagctctgtcgtggtagcagatggtcccacttattctagggtcttactctttgtatgatgaaaagaatgtgttatgaatcggtgctgtcagccctgctgtcagaccttcttccacagcaaatgagatgtatgcccaaagcggtagaattaaagaagagtaaaatggctgttgaagc

SEQ ID NO: 197 - DNA, 356 bp, Artificial Sequence
  Description of Artificial sequences:primer
  misc_feature (1)..(356): 3' terminal sequence from clone image:1493187. homo sapiens, clone image:4831215, mrna.
tttgagaaatagggttttttattatatattcatttttccatatttctggaaaatgaaacagacatggagtatttcaaagctgggagagatcattatattggagttaccttagaaagagggggctgtttctgccaccacaacaaagaatgaaacaacacaaatatttacgttttcttcttgtcctcataatgcttttactgcactcgtctttcaacctttaacatctactgcatctgtgactgttgtttcagtaaaacacggaagcttgaatgtaagctcatttcattgcctgctgcacaacacacaaaacagcattttcttattcttgaaatatgatagcaacgtctccttccatg

SEQ ID NO: 198 - DNA, 358 bp, Artificial Sequence
  Description of Artificial sequences:primer
  misc_feature (1)..(358): 3' terminal sequence from clone image:149809. gata binding protein 2(GATA2) gene.
  misc_feature (111)..(111): n is a, c, g, or t
  misc_feature (117)..(117): n is a, c, g, or t
  misc_feature (180)..(180): n is a, c, g, or t
  misc_feature (253)..(253): n is a, c, g, or t
  misc_feature (280)..(280): n is a, c, g, or t
  misc_feature (315)..(315): n is a, c, g, or t
aacagtactcactttaaaggaataagaggatagcatacattttttacagacaatatataaatgttgtacataattaacaataacttagttcactaatccaaaataaaacangccaantaaaacataaaaacagaaaatactgccgattctttttcttatgcggacactagtacaaaatangttacttctggccgtggtgctccctgcagcgactgcccgcccatattgcacttgggtcactacatcagcacantcctcctcctggggccagggcccttcnacaggccaccacaccccgccgtcaccgcatacagnattctaaggctcggggacacgtttatatacaggctgtaccttg

SEQ ID NO: 199 - DNA, 392 bp, Artificial Sequence
  Description of Artificial sequences:primer
  misc_feature (1)..(392): 5' terminal sequence from clone image:149809. gata binding protein 2(GATA2) gene.
  misc_feature (74)..(74): n is a, c, g, or t
  misc_feature (77)..(77): n is a, c, g, or t
gaaacgtctcccagatcgctcccttggctttgaggccgaagctgctgtgactgtgtccccttactgagcgcaancancagcctgtcttgtcaggtggaccctgtaaatacatcctttttctgctaacccttcaaccccctcgcctcctactctgagacaaaagaaaaaatattaaaaaaatgcataggcttaactcgctgatgagttaattgttttatttttaaactctttttgggtccagttgattgtacgtagccacaggagccctgctatgaaaggaataaaacctacacacaaggttgggagctttgcaattctttttgggaaaagagctggggatcccacagccctagttatggaaagctggggggtggggggagggggcctttggt

SEQ ID NO: 200 - DNA, 3383 bp, Artificial Sequence
  Description of Artificial sequences:primer
  misc_feature (1)..(3383): gata binding protein 2(GATA2) gene.
gagcgccaggaaggtagcgaggccagcgtcgccccgggactcgctgctcaagtctgtctattgcctgccgccacatccatcctagcagggccccgtcgcccaccaggcggacaaaagcggtccgctgaacaccatgcggccgctcggcgtgccgcccaggctctgctggtgagcgccgccaccccgcgcccaggtcccgcgagcccgcctgccgcgcacctcgccctgctcccagctctactccaggccccgtccgcccgggggcgccgcccaccgcgcctcgctcgggccgttgccgtctgcacccagaccctgagccgccgccgccggccatggaggtggcgccggagcagccgcgctggatggcgcacccggccgtgctgaatgcgcagcaccccgactcacaccacccgggcctggcgcacaactacatggaacccgcgcagctgctgcctccagacgaggtggacgtcttcttcaatcacctcgactcgcagggcaacccctactatgccaaccccgctcacgcgcgggcgcgcgtctcctacagccccgcgcacgcccgcctgaccggaggccagatgtgccgcccacacttgttgcacagcccgggtttgccctggctggacgggggcaaagcagccctctctgccgctgcggcccaccaccacaacccctggaccgtgagccccttctccaagacgccactgcacccctcagctgctggaggccctggaggcccactctctgtgtacccaggggctgggggtgggagcgggggaggcagcgggagctcagtggcctccctcacccctacagcagcccactctggctcccaccttttcggcttcccacccacgccacccaaagaagtgtctcctgaccctagcaccacgggggctgcgtctccagcctcatcttccgcggggggtagtgcagcccgaggagaggacaaggacggcgtcaagtaccaggtgtcactgacggagagcatgaagatggaaagtggcagtcccctgcgcccaggcctagctactatgggcacccagcctgctacacaccaccccatccccacctacccctcctatgtgccggcggctgcccacgactacagcagcggactcttccaccccggaggcttcctggggggaccggcctccagcttcacccctaagcagcgcagcaaggctcgttcctgttcagaaggccgggagtgtgtcaactgtggggccacagccacccctctctggcggcgggacggcaccggccactacctgtgcaatgcctgtggcctctaccacaagatgaatgggcagaaccgaccactcatcaagcccaagcgaagactgtcggccgccagaagagccggcacctgttgtgcaaattgtcagacgacaaccaccaccttatggcgccgaaacgccaacggggaccctgtctgcaacgcctgtggcctctactacaagctgcacaatgttaacaggccactgaccatgaagaaggaagggatccagactcggaaccggaagatgtccaacaagtccaagaagagcaagaaaggggcggagtgcttcgaggagctgtcaaagtgcatgcaggagaagtcatcccccttcagtgcagctgccctggctggacacatggcacctgtgggccacctcccgcccttcagccactccggacacatcctgcccactccgacgcccatccacccctcctccagcctctccttcggccacccccacccgtccagcatggtgaccgccatgggctagggaacagatggacgtcgaggaccgggcactcccgggatgggtggaccaaacccttagcagcccagcatttcccgaaggccgacaccactcctgccagcccggctcggcccagcaccccctctcctggagggcgcccagcagcctgccagcagttactgtgaatgttccccaccgctgagaggctgcctccgcacctgactgctgcccaggtggggtttcctgcatggacagttgtttggagaacaacaaggacaactttatgtagagaaaaggaggggacgggacagacgaaggcaaccatttttagaaggaaaaaggattaggcaaaaataatttattttgctcttgtttctaacaaggacttggagacttggtggtctgagctgtcccaagtcctccggttcttcctcgggattggcgggtccacttgccagggctctgggggcagatttgtggggacctcagcctgcaccctcttctcttctggcttccctctctgaaatagccgaactccaggctgggctgagccaaagccagagtggccacggcccagggagggtgagctggtgcctgctttgacgggccaggccctggagggcagagacaatcacgggcggtcctgcacagattcccaggccagggctgggtcacaggaaggaaacaacattttcttgaaaggggaaacgtctcccagatcgctcccttggctttgaggccgaagctgctgtgactgtgtccccttactgagcgcaagccacagcctgtcttgtcaggtggaccctgtaaatacatcctttttctgctaacccttcaaccccctcgcctcctactctgagacaaaagaaaaaatattaaaaaaatgcataggcttaactcgctgatgagttaattgttttatttttaaactctttttgggtccagttgattgtacgtagccacaggagccctgctatgaaaggaataaaacctacacacaaggttggagctttgcaattctttttggaaaagagctgggatcccacagccctagtatgaaagctgggggtggggaggggcctttgctgcccttggtttctgggggctggttggcatttgctggcctggcagggggtgaaggcaggagttgggggcaggtcaggaccaggacccagggagaggctgtgtccctgctggggtctcaggtccagctttactgtggctgtctggatccttcccaaggtacagctgtatataaacgtgtcccgagcttagattctgtatgcggtgacggcggggtgtggtggcctgtgaggggcccctggcccaggaggaggattgtgctgatgtagtgaccaagtgcaatatgggcgggcagtcgctgcagggagcaccacggccagaagtaacttattttgtactagtgtccgcataagaaaaagaatcggcagtattttctgtttttatgttttatttggcttgttttattttggattagtgaactaagttattgttaattatgtacaacatttatatattgtctgtaaaaaatgtatgctatcctcttattcctttaaagtgagtactgttaagaataataaaatactttttgtgaaaaaaaaaaaaaaaaaa

SEQ ID NO: 201 - DNA, 430 bp, Artificial Sequence
  Description of Artificial sequences:primer
  misc_feature (1)..(430): 3' terminal sequence from clone image:1500894. carbohydrate (chondroitin 4) sulfotransferase 13(CHST13) gene.
tttttttttcagaaagtaacaaaatacatttatttcaaaaccatgaccgcccagctcaccaaagtcccataaaacctgtgaccgcattgcaccaggggctctgttggcatggagcctgaagacccagcgtcttgccagactgagaccgaagtggcgcctgggtagggccagccgcgtgggagaggagaggagacccgatggcagtggaaggcagctcccacctggctcccgggacgccccatcgtgaggccagccaagggagggctttcgtccttggccgcagctgtccttgccagggtgggcgaggtggggaggacacaggctcgggccacactgacaccggtgtcagcattatgttctgatgcaccatgaacaggttcaggggcagggctgacccccaaaaatggcctttaaaagcctaaaaccctgg

SEQ ID NO: 202 - DNA, 1747 bp, Artificial Sequence
  Description of Artificial sequences:primer
  misc_feature (1)..(1747): carbohydrate (chondroitin 4) sulfotransferase 13(CHST13) gene.
atggggaggcgctgctgccggcggcgcgtgctggcggccgcctgtctgggcgccgcgctcctgctcctatgcgccgcgccccgctccctgcgcccggcatttggaaacagagccctgggctccagctggcttggtggggagaagagaagccccctgcagaagctctatgacctggatcaggacccgcgctcgaccctggcgaaggtgcaccgtcagcggcgcgacctgctgaacagcgcctgtagccgccactcacgccggcagcgcctgctacagccggaggacctgcggcacgtgctggtggacgacgcgcatggcctgctctactgctacgtgcccaaggtggcctgcaccaactggaagcgcgtgctgctggcgctgagcggccaagcccgcggcgacccgcgcgccatctccgcgcaagaggcgcacgcgcctggccgcctgccctcactggccgacttcagccccgccgagatcaaccggcgcctgcgcgcctacttggccttcctgttcgtgcgggagcccttcgagcgcctggcatcggcttaccgcaacaagctcgcgcgcccctacagcgccgccttccagaggcgctacggtgcacgcatcgttcagcgcctgcggccgcgcgcgctccccgacgcccgggcccgcggccacgacgtgcgcttcgcggagttcctggcctacctgctggacccgcgcacgcggcgtgaggagcccttcaacgagcactgggagcgcgcgcacgcgctctgccacccgtgtcgcctccgctacgacgtcgtgggcaagttcgagacgctggcggaggacgcggccttcgtgctgggcctggcgggcgcatccgacctgagcttccctgggccgccgcggccccggggagccgccgcctcccgcgacctggcagcgcgcctcttccgggacatcagccccttctaccagcggcgcctcttcgacctctacaagatggacttcctgcttttcaactactccgccccctcctacctgcggctgctctagcggtcctggaggtcctgtggccacgcggggcaagtgcctttccgacaagacccccggggaatgcaggtgctgccggccccaggacccctcttcaagagccactgcgtgcactcacctggccgccgggccagcgggcgcagggcacacctggccaggcttgggggcagcccatctcaggtggccctgcacgcgtgtgcctgcctcggcctgtcgcctgaggcctgcttcctccacttgctccagctgacaggcacctctccaggccccgtagatgggcaaggacttgataaccagggttttaggcttttaaaggccattttgggggtcagccctgcccctgaacctgttcatggtgcatcagaacataatgctgacaccggtgtcagtgtggcccgagcctgtgtcctccccacctcgcccaccctggcaaggacagctgcggccaaggacgaaagccctcccttggctggcctcacgatggggccgtcccgggagccaggtgggagctgccttccactgccatcgggtctcctctcctctcccacgcggctggccctacccaggcgccaccttcggtctcagtctggcaagacgctgggtcttcaggctccatgccaacagagcccctggtgcaatgcggtcacaggttttatgggactttggtgagctgggcggtcatggttttgaaataaatgtattttgttactttctgaaaaaaaaa

SEQ ID NO: 203 - DNA, 270 bp, Artificial Sequence
  Description of Artificial sequences:primer
  misc_feature (1)..(270): 3' terminal sequence from clone image:150361. insulin-like growth factor 1 receptor(IGF1R) gene.
  misc_feature (13)..(13): n is a, c, g, or t
  misc_feature (20)..(20): n is a, c, g, or t
  misc_feature (25)..(25): n is a, c, g, or t
  misc_feature (37)..(37): n is a, c, g, or t
  misc_feature (46)..(46): n is a, c, g, or t
  misc_feature (49)..(49): n is a, c, g, or t
  misc_feature (51)..(51): n is a, c, g, or t
  misc_feature (67)..(67): n is a, c, g, or t
  misc_feature (69)..(69): n is a, c, g, or t
  misc_feature (79)..(79): n is a, c, g, or t
  misc_feature (81)..(81): n is a, c, g, or t
  misc_feature (85)..(85): n is a, c, g, or t
  misc_feature (87)..(87): n is a, c, g, or t
  misc_feature (106)..(106): n is a, c, g, or t
  misc_feature (108)..(108): n is a, c, g, or t
  misc_feature (120)..(120): n is a, c, g, or t
  misc_feature (126)..(126): n is a, c, g, or t
  misc_feature (132)..(132): n is a, c, g, or t
  misc_feature (138)..(138): n is a, c, g, or t
  misc_feature (148)..(148): n is a, c, g, or t
  misc_feature (161)..(161): n is a, c, g, or t
  misc_feature (165)..(165): n is a, c, g, or t
  misc_feature (174)..(174): n is a, c, g, or t
  misc_feature (192)..(192): n is a, c, g, or t
  misc_feature (199)..(199): n is a, c, g, or t
  misc_feature (204)..(204): n is a, c, g, or t
  misc_feature (218)..(219): n is a, c, g, or t
  misc_feature (228)..(228): n is a, c, g, or t
  misc_feature (262)..(262): n is a, c, g, or t
  misc_feature (264)..(264): n is a, c, g, or t
caaataaaaggantgaagtntggcnccggagggggtnccccgaccncgntntgggggctcctttttntntccgccgcgntntcgntntggccgacgagtggagaantntgcgggccaggnatcganatccgnaacgantatcagcagntgaagcgcctggngaantgcacggtnatcgagggttacctccanatcctgntcatntccaaggccgaggnntaccgaagntaccgtttccccaagttcacggtcattaccgagnanttgctg

SEQ ID NO: 204 - DNA, 385 bp, Artificial Sequence
  Description of Artificial sequences:primer
  misc_feature (1)..(385): 5' terminal sequence from clone image:150361. insulin-like growth factor 1 receptor(IGF1R) gene.
  misc_feature (239)..(239): n is a, c, g, or t
  misc_feature (359)..(359): n is a, c, g, or t
  misc_feature (367)..(367): n is a, c, g, or t
  misc_feature (378)..(378): n is a, c, g, or t
gtggcggcactcattgttctcggtgcacgcccgcttcccacacgtgcttgtggcacattttctggcagcggtttgtggtccagcagcggtagttgtactcattgttgatggtggtcttctcacacatcggcttctcctccatggtccctggacacaggtccccacattcctttgggggcttattccccacaatgtagttattggacaccgcatccaggatcagggaccagtccacagtngagaggtaacagaggtcagcatttttctcaatcctgatggccccccgagtaatgttcctcaggttgtaaagcccaatatccttgaggatgggtcaatcttcgaaggatgaaccaggggcntaggtttnttggaaggagnttttcca

SEQ ID NO: 205 - DNA, 4989 bp, Artificial Sequence
  Description of Artificial sequences:primer
  misc_feature (1)..(4989): insulin-like growth factor 1 receptor(IGF1R) gene.
ttttttttttttttgagaaagggaatttcatcccaaataaaaggaatgaagtctggctccggaggagggtccccgacctcgctgtgggggctcctgtttctctccgccgcgctctcgctctggccgacgagtggagaaatctgcgggccaggcatcgacatccgcaacgactatcagcagctgaagcgcctggagaactgcacggtgatcgagggctacctccacatcctgctcatctccaaggccgaggactaccgcagctaccgcttccccaagctcacggtcattaccgagtacttgctgctgttccgagtggctggcctcgagagcctcggagacctcttccccaacctcacggtcatccgcggctggaaactcttctacaactacgccctggtcatcttcgagatgaccaatctcaaggatattgggctttacaacctgaggaacattactcggggggccatcaggattgagaaaaatgctgacctctgttacctctccactgtggactggtccctgatcctggatgcggtgtccaataactacattgtggggaataagcccccaaaggaatgtggggacctgtgtccagggaccatggaggagaagccgatgtgtgagaagaccaccatcaacaatgagtacaactaccgctgctggaccacaaaccgctgccagaaaatgtgcccaagcacgtgtgggaagcgggcgtgcaccgagaacaatgagtgctgccaccccgagtgcctgggcagctgcagcgcgcctgacaacgacacggcctgtgtagcttgccgccactactactatgccggtgtctgtgtgcctgcctgcccgcccaacacctacaggtttgagggctggcgctgtgtggaccgtgacttctgcgccaacatcctcagcgccgagagcagcgactccgaggggtttgtgatccacgacggcgagtgcatgcaggagtgcccctcgggcttcatccgcaacggcagccagagcatgtactgcatcccttgtgaaggtccttgcccgaaggtctgtgaggaagaaaagaaaacaaagaccattgattctgttacttctgctcagatgctccaaggatgcaccatcttcaagggcaatttgctcattaacatccgacgggggaataacattgcttcagagctggagaacttcatggggctcatcgaggtggtgacgggctacgtgaagatccgccattctcatgccttggtctccttgtccttcctaaaaaaccttcgcctcatcctaggagaggagcagctagaagggaattactccttctacgtcctcgacaaccagaacttgcagcaactgtgggactgggaccaccgcaacctgaccatcaaagcagggaaaatgtactttgctttcaatcccaaattatgtgtttccgaaatttaccgcatggaggaagtgacggggactaaagggcgccaaagcaaaggggacataaacaccaggaacaacggggagagagcctcctgtgaaagtgacgtcctgcatttcacctccaccaccacgtcgaagaatcgcatcatcataacctggcaccggtaccggccccctgactacagggatctcatcagcttcaccgtttactacaaggaagcaccctttaagaatgtcacagagtatgatgggcaggatgcctgcggctccaacagctggaacatggtggacgtggacctcccgcccaacaaggacgtggagcccggcatcttactacatgggctgaagccctggactcagtacgccgtttacgtcaaggctgtgaccctcaccatggtggagaacgaccatatccgtggggccaagagtgagatcttgtacattcgcaccaatgcttcagttccttccattcccttggacgttctttcagcatcgaactcctcttctcagttaatcgtgaagtggaaccctccctctctgcccaacggcaacctgagttactacattgtgcgctggcagcggcagcctcaggacggctacctttaccggcacaattactgctccaaagacaaaatccccatcaggaagtatgccgacggcaccatcgacattgaggaggtcacagagaaccccaagactgaggtgtgtggtggggagaaagggccttgctgcgcctgccccaaaactgaagccgagaagcaggccgagaaggaggaggctgaataccgcaaagtctttgagaatttcctgcacaactccatcttcgtgcccagacctgaaaggaagcggagagatgtcatgcaagtggccaacaccaccatgtccagccgaagcaggaacaccacggccgcagacacctacaacatcaccgacccggaagagctggagacagagtaccctttctttgagagcagagtggataacaaggagagaactgtcatttctaaccttcggcctttcacattgtaccgcatcgatatccacagctgcaaccacgaggctgagaagctgggctgcagcgcctccaacttcgtctttgcaaggactatgcccgcagaaggagcagatgacattcctgggccagtgacctgggagccaaggcctgaaaactccatctttttaaagtggccggaacctgagaatcccaatggattgattctaatgtatgaaataaaatacggatcacaagttgaggatcagcgagaatgtgtgtccagacaggaatacaggaagtatggaggggccaagctaaaccggctaaacccggggaactacacagcccggattcaggccacatctctctctgggaatgggtcgtggacagatcctgtgttcttctatgtccaggccaaaacaggatatgaaaacttcatccatctgatcatcgctctgcccgtcgctgtcctgttgatcgtgggagggttggtgattatgctgtacgtcttccatagaaagagaaataacagcaggctggggaatggagtgctgtatgcctctgtgaacccggagtacttcagcgctgctgatgtgtacgttcctgatgagtgggaggtggctcgggagaagatcaccatgagccgggaacttgggcaggggtcgtttgggatggtctatgaaggagttgccaagggtgtggtgaaagatgaacctgaaaccagagtggccattaaaacagtgaacgaggccgcaagcatgcgtgagaggattgagtttctcaacgaagcttctgtgatgaaggagttcaattgtcaccatgtggtgcgattgctgggtgtggtgtcccaaggccagccaacactggtcatcatggaactgatgacacggggcgatctcaaaagttatctccggtctctgaggccagaaatggagaataatccagtcctagcacctccaagcctgagcaagatgattcagatggccggagagattgcagacggcatggcatacctcaacgccaataagttcgtccacagagaccttgctgcccggaattgcatggtagccgaagatttcacagtcaaaatcggagattttggtatgacgcgagatatctatgagacagactattaccggaaaggaggcaaagggctgctgcccgtgcgctggatgtctcctgagtccctcaaggatggagtcttcaccacttactcggacgtctggtccttcggggtcgtcctctgggagatcgccacactggccgagcagccctaccagggcttgtccaacgagcaagtccttcgcttcgtcatggagggcggccttctggacaagccagacaactgtcctgacatgctgtttgaactgatgcgcatgtgctggcagtataaccccaagatgaggccttccttcctggagatcatcagcagcatcaaagaggagatggagcctggcttccgggaggtctccttctactacagcgaggagaacaagctgcccgagccggaggagctggacctggagccagagaacatggagagcgtccccctggacccctcggcctcctcgtcctccctgccactgcccgacagacactcaggacacaaggccgagaacggccccggccctggggtgctggtcctccgcgccagcttcgacgagagacagccttacgcccacatgaacgggggccgcaagaacgagcgggccttgccgctgccccagtcttcgacctgctgatccttggatcctgaatctgtgcaaacagtaacgtgtgcgcacgcgcagcggggtggggggggagagagagttttaacaatccattcacaagcctcctgtacctcagtggatcttcagttctgcccttgctgcccgcgggagacagcttctctgcagtaaaacacatttgggatgttccttttttcaatatgcaagcagctttttattccctgcccaaacccttaactgacatgggcctttaagaaccttaatgacaacacttaatagcaacagagcacttgagaaccagtctcctcactctgtccctgtccttccctgttctccctttctctctcctctctgcttcataacggaaaaataattgccacaagtccagctgggaagccctttttatcagtttgaggaagtggctgtccctgtggccccatccaaccactgtacacacccgcctgacaccgtgggtcattacaaaaaaacacgtggagatggaaatttttacctttatctttcacctttctagggacatgaaatttacaaagggccatcgttcatccaaggctgttaccattttaacgctgcctaattttgccaaaatcctgaactttctccctcatcggcccggcgctgattcctcgtgtccggaggcatgggtgagcatggcagctggttgctccatttgagagacacgctggcgacacactccgtccatccgactgcccctgctgtgctgctcaaggccacaggcacacaggtctcattgcttctgactagattattatttgggggaactggacacaataggtctttctctcagtgaaggtggggagaagctgaaccggc

SEQ ID NO: 206 - DNA, 330 bp, Artificial Sequence
  Description of Artificial sequences:primer
  misc_feature (1)..(330): 3' terminal sequence from clone image:150644. suppressor of cytokine signaling 2(SOCS2) gene.
  misc_feature (10)..(10): n is a, c, g, or t
  misc_feature (148)..(148): n is a, c, g, or t
  misc_feature (198)..(198): n is a, c, g, or t
cagtatgatntgttttattacaatttataactgaattttctcattcacacagggtccacctttatggtgacacaccacaggattgtagctatgcaggaaaattttaaagccataaaataaataatgtctggactctagaaaagatggnacatttataacagttatgcagactaacatagcaaaaaataagtggccacnccactttgtatttttctttagtattatgcctactcaacttgtaaaagactggccatgtcataatgtttgtagtttctaaaccatgtttttggaaacacagaggacatcagtgttatgcctattcaaattata

SEQ ID NO: 207 - DNA, 436 bp, Artificial Sequence
  Description of Artificial sequences:primer
  misc_feature (1)..(436): 5' terminal sequence from clone image:150644. suppressor of cytokine signaling 2(SOCS2) gene.
  misc_feature (419)..(419): n is a, c, g, or t
ggaaaagactttctcttttcctttaaagctaaagacaagaatatcatgctatacaggtgcaactcaatccccgttaataaaaaccaatgtaggtataggcattctaccctttgaaatagctgtgtcccaacctgttgccattgattttttggaaatggctttagaaatatccaagttgtccttgaattgtctaaccatggacataaacagttgtctcccttctactgtgtagaatactttgacttaattttcttccagatacagggggatacctgcctgtttttcaaagtgtttatttactgctgttactatttgattaggaatgtattaaataaaaaaaacctggatttctacaagttggcacttattggagttctaggaggaacgtacacttttcagggtaatagagggttgccctnaaaaacttacgtcaagt

SEQ ID NO: 208 - DNA, 2210 bp, Artificial Sequence
  Description of Artificial sequences:primer
  misc_feature (1)..(2210): suppressor of cytokine signaling 2(SOCS2) gene.
agccgcggcctcaactaaaagtggccattgacctttcaagctttcgagcagtgatgcaatagaatagtatttcaaagaaaaatgcttatcgaaattttggatccggttttcccgtgattgttaagggtttcttttaaaaagtaggtcacatttcaagtaggtcatatttcgggggcgggtgcgcagacaaggagatgagtttccactaaggccagggggcctccaacggggttggaggtgagaatcccaggtagggtagaggtgccgagatccttccgaatcccagccctggggcgtcagccctgcagggaatggcagagacactctccggactgagggaaccgaggccagtcaccaagccccttccgggcgcgcaggcgatcagtgggtgaccgcggctgcgagggactttgtcatccgtcctccaggatctggggagaaagagccccatcccttctctctctgccaccatttcggacaccccgcagggactcgttttgggattcgcactgacttcaaggaaggacgcgaacccttctctgaccccagctcgggcggccacctgtctttgccgcggtgacccttctctcatgaccctgcggtgccttgagccctccgggaatggcggggaagggacgcggagccagtgggggaccgcggggtcggcggaggagccatccccgcaggcggcgcgtctggcgaaggccctgcgggagctcggtcagacaggatggtactggggaagtatgactgttaatgaagccaaagagaaattaaaagaggcaccagaaggaactttcttgattagagatagctcgcattcagactacctactaacaatatctgttaaaacatcagctggaccaactaatcttcgaatcgaataccaagacggaaaattcagattggactctatcatatgtgtcaaatccaagcttaaacaatttgacagtgtggttcatctgatcgactactatgttcagatgtgcaaggataagcggacaggtccagaagccccccggaacggcactgttcacctttatctgaccaaaccgctctacacgtcagcaccatctctgcagcatctctgtaggctcaccattaacaaatgtaccggtgccatctggggactgcctttaccaacaagactaaaagattacttggaagaatataaattccaggtataaatgtttctctttttttaaacatgtctcacatagagtatctccgaatgcagctatgtaaaagagaaccaaaacttgagtgctctggataactatatggaatgctttctaagaacagctgaagctaatctaatttaaatttaacagcttgaagaggtagctaggtgtttaaagttcctccagatacttttacctgagtgatgcttcccttcctaaggctgaccaagacctgttgatccttttagattaaaaataaaatgtcgcatgtaaaggctgaagtcgcgttttatcagaatgccttgccttcttaggttcttttccattatgtcaaaggtccaggctccagtaggagagaaagaactcctcataggaatactgaagaagtgggaaggaaccaagctgacacaggcctcactgcaatttgatatgcctgctgatcagagtctcttgggcattttatattttgcattctgatgtacctaggagttttgttaaacagatgatgtatgtgagtatttatcccattttatgcaattaaccaaatcaaccaaaaaaagtgaccatgaagtcctgtatttgtctttttactacatgtaggaactctcatgtgaatgagtactgtagtaatccattctatgggagccttatttcagaaatatttcaaactggtgcaaatggaaaagactttctcttttcctttaaagctaaagacaagaatatcatgctatacaggtgcaactcaatccccgttaataaaaaccaatgtaggtataggcattctaccctttgaaatagctgtgtcccaacctgttgccattgattttttggaaatggctttagaaatatccaagttgtccttgaattgtctaaccatggacataaacagttgtctcccttctactgtgtagaatactttgacttaattttcttccagatacagggggatacctgcctgtttttcaaagtgtttatttactgctgttactatttgattagaatgtattaaataaaaaaaacctgatttct

SEQ ID NO: 209 - DNA, 470 bp, Artificial Sequence
  Description of Artificial sequences:primer
  misc_feature (1)..(470): 5' terminal sequence from clone image:151149. insulin receptor(INSR) gene.
  misc_feature (149)..(149): n is a, c, g, or t
  misc_feature (317)..(317): n is a, c, g, or t
  misc_feature (341)..(341): n is a, c, g, or t
  misc_feature (402)..(402): n is a, c, g, or t
  misc_feature (418)..(418): n is a, c, g, or t
  misc_feature (424)..(424): n is a, c, g, or t
  misc_feature (464)..(464): n is a, c, g, or t
gggcaacaatctggcagctgagctagaagccaacctcggcctcattgaagaaatttcagggtatctaaaaatccgccgatcctacgctctggtgtcactttccttcttccggaagttacgtctgattcgaggagagaccttggaaattnggaactactccttctatgccttggacaaccagaacctaaggcagctctgggactggagcaaacacaacctcaccatcactcaggggaaactcttcttccactataaccccaaactctgcttgtcagaaatccacaagatgggaaggaagtttcagggaaccaaggggncgccaggaggagaaacgacatttnccctggaaggaccaatggggggaccagggcatcctgtggaaaaatggagtttactttaaanttttgctttaacattngggacntttttttggacaagttttttgttgaagttggggagccctnattttg

SEQ ID NO: 210 - DNA, 4691 bp, Artificial Sequence
  Description of Artificial sequences:primer
  misc_feature (1)..(4691): insulin receptor(INSR) gene.
gagaaggacgcgcggcccccagcgctcttgggggccgcctcggagcatgacccccgcgggccagcgccgcgcgcctgatccgaggagaccccgcgctcccgcagccatgggcaccgggggccggcggggggcggcggccgcgccgctgctggtggcggtggccgcgctgctactgggcgccgcgggccacctgtaccccggagaggtgtgtcccggcatggatatccggaacaacctcactaggttgcatgagctggagaattgctctgtcatcgaaggacacttgcagatactcttgatgttcaaaacgaggcccgaagatttccgagacctcagtttccccaaactcatcatgatcactgattacttgctgctcttccgggtctatgggctcgagagcctgaaggacctgttccccaacctcacggtcatccggggatcacgactgttctttaactacgcgctggtcatcttcgagatggttcacctcaaggaactcggcctctacaacctgatgaacatcacccggggttctgtccgcatcgagaagaacaatgagctctgttacttggccactatcgactggtcccgtatcctggattccgtggaggataatcacatcgtgttgaacaaagatgacaacgaggagtgtggagacatctgtccgggtaccgcgaagggcaagaccaactgccccgccaccgtcatcaacgggcagtttgtcgaacgatgttggactcatagtcactgccagaaagtttgcccgaccatctgtaagtcacacggctgcaccgccgaaggcctctgttgccacagcgagtgcctgggcaactgttctcagcccgacgaccccaccaagtgcgtggcctgccgcaacttctacctggacggcaggtgtgtggagacctgcccgcccccgtactaccacttccaggactggcgctgtgtgaacttcagcttctgccaggacctgcaccacaaatgcaagaactcgcggaggcagggctgccaccaatacgtcattcacaacaacaagtgcatccctgagtgtccctccgggtacacgatgaattccagcaacttgctgtgcaccccatgcctgggtccctgtcccaaggtgtgccacctcctagaaggcgagaagaccatcgactcggtgacgtctgcccaggagctccgaggatgcaccgtcatcaacgggagtctgatcatcaacattcgaggaggcaacaatctggcagctgagctagaagccaacctcggcctcattgaagaaatttcagggtatctaaaaatccgccgatcctacgctctggtgtcactttccttcttccggaagttacgtctgattcgaggagagaccttggaaattgggaactactccttctatgccttggacaaccagaacctaaggcagctctgggactggagcaaacacaacctcaccaccactcaggggaaactcttcttccactataaccccaaactctgcttgtcagaaatccacaagatggaagaagtttcaggaaccaaggggcgccaggagagaaacgacattgccctgaagaccaatggggacaaggcatcctgtgaaaatgagttacttaaattttcttacattcggacatcttttgacaagatcttgctgagatgggagccgtactggccccccgacttccgagacctcttggggttcatgctgttctacaaagaggccccttatcagaatgtgacggagttcgatgggcaggatgcgtgtggttccaacagttggacggtggtagacattgacccacccctgaggtccaacgaccccaaatcacagaaccacccagggtggctgatgcggggtctcaagccctggacccagtatgccatctttgtgaagaccctggtcaccttttcggatgaacgccggacctatggggccaagagtgacatcatttatgtccagacagatgccaccaacccctctgtgcccctggatccaatctcagtgtctaactcatcatcccagattattctgaagtggaaaccaccctccgaccccaatggcaacatcacccactacctggttttctgggagaggcaggcggaagacagtgagctgttcgagctggattattgcctcaaagggctgaagctgccctcgaggacctggtctccaccattcgagtctgaagattctcagaagcacaaccagagtgagtatgaggattcggccggcgaatgctgctcctgtccaaagacagactctcagatcctgaaggagctggaggagtcctcgtttaggaagacgtttgaggattacctgcacaacgtggttttcgtccccagaaaaacctcttcaggcactggtgccgaggaccctaggccatctcggaaacgcaggtcccttggcgatgttgggaatgtgacggtggccgtgcccacggtggcagctttccccaacacttcctcgaccagcgtgcccacgagtccggaggagcacaggccttttgagaaggtggtgaacaaggagtcgctggtcatctccggcttgcgacacttcacgggctatcgcatcgagctgcaggcttgcaaccaggacacccctgaggaacggtgcagtgtggcagcctacgtcagtgcgaggaccatgcctgaagccaaggctgatgacattgttggccctgtgacgcatgaaatctttgagaacaacgtcgtccacttgatgtggcaggagccgaaggagcccaatggtctgatcgtgctgtatgaagtgagttatcggcgatatggtgatgaggagctgcatctctgcgtctcccgcaagcacttcgctctggaacggggctgcaggctgcgtgggctgtcaccggggaactacagcgtgcgaatccgggccacctcccttgcgggcaacggctcttggacggaacccacctatttctacgtgacagactatttagacgtcccgtcaaatattgcaaaaattatcatcggccccctcatctttgtctttctcttcagtgttgtgattggaagtatttatctattcctgagaaagaggcagccagatgggccgctgggaccgctttacgcttcttcaaaccctgagtatctcagtgccagtgatgtgtttccatgctctgtgtacgtgccggacgagtgggaggtgtctcgagagaagatcaccctccttcgagagctggggcagggctccttcggcatggtgtatgagggcaatgccagggacatcatcaagggtgaggcagagacccgcgtggcggtgaagacggtcaacgagtcagccagtctccgagagcggattgagttcctcaatgaggcctcggtcatgaagggcttcacctgccatcacgtggtgcgcctcctgggagtggtgtccaagggccagcccacgctggtggtgatggagctgatggctcacggagacctgaagagctacctccgttctctgcggccagaggctgagaataatcctggccgccctccccctacccttcaagagatgattcagatggcggcagagattgctgacgggatggcctacctgaacgccaagaagtttgtgcatcgggacctggcagcgagaaactgcatggtcgcccatgattttactgtcaaaattggagactttggaatgaccagagacatctatgaaacggattactaccggaaagggggcaagggtctgctccctgtacggtggatggcaccggagtccctgaaggatggggtcttcaccacttcttctgacatgtggtcctttggcgtggtcctttgggaaatcaccagcttggcagaacagccttaccaaggcctgtctaatgaacaggtgttgaaatttgtcatggatggagggtatctggatcaacccgacaactgtccagagagagtcactgacctcatgcgcatgtgctggcaattcaaccccaagatgaggccaaccttcctggagattgtcaacctgctcaaggacgacctgcaccccagctttccagaggtgtcgttcttccacagcgaggagaacaaggctcccgagagtgaggagctggagatggagtttgaggacatggagaatgtgcccctggaccgttcctcgcactgtcagagggaggaggcggggggccgggatggagggtcctcgctgggtttcaagcggagctacgaggaacacatcccttacacacacatgaacggaggcaagaaaaacgggcggattctgaccttgcctcggtccaatccttcctaacagtgcctaccgtggcgggggcgggcaggggttcccattttcgctttcctctggtttgaaagcctctggaaaactcaggattctcacgactctaccatgtccagtggagttcagagatcgttcctatacatttctgttcatcttaaggtggactcgtttggttaccaatttaactagtcctgcagaggatttaactgtgaacctggagggcaaggggtttccacagttgctgctcctttggggcaacgacggtttcaaaccaggattttgtgttttttcgttccccccacccgcccccagcagatggaaagaaagcacctgtttttacaaattcttttttttttttttttttttttttttttgctggtgtctgagcttcagtataaaagacaaaacttcctgtttgtggaacaaaatttcgaaagaaaaaaccaaa

SEQ ID NO: 211 - DNA, 241 bp, Artificial Sequence
  Description of Artificial sequences:primer
  misc_feature (1)..(241): 3' terminal sequence from clone image:151495. transcription factor dp-1(TFDP1) gene.
  misc_feature (5)..(5): n is a, c, g, or t
  misc_feature (7)..(7): n is a, c, g, or t
  misc_feature (238)..(238): n is a, c, g, or t
taaantncccatgcgcgttttattaataaaaactaacagtgccaagttaaacaagtcaaacaattaaagtctctttatataccataaaatattacagaaaagtttatttgtgtttcaataaaaagactatcgttttagaacaggcagctaatagcaactgtgcagttaatgggttttgtgaataaattttaaaagagactactgcctgtccttaaattcctttttctttttataaaanaag

SEQ ID NO: 212 - DNA, 442 bp, Artificial Sequence
  Description of Artificial sequences:primer
  misc_feature (1)..(442): 5' terminal sequence from clone image:151495. transcription factor dp-1(TFDP1) gene.
  misc_feature (384)..(384): n is a, c, g, or t
gaaagtttttgctttttgctgaagaaattgtatttcaaccacatccatgaaaataaaacacctcctgttgtggatggtgagcccctgatgccgcttatttgccgtgagtttggacggcacccctgctggcggatagcaagactctgtggagtttgttcagtggtacggtgtccaagcaaacagcagaatgcaactttctaaacagccccaagcaaacagcagaattcaactttttaaacaataaacaccatcaaccttattgactttattgtcccttaaattatattgactgttgtgattccatcaagtttgtacactcttttctctccctgttttgcaggcaacaaattgcgaagtgcttttgtttgtttgttttcgtttggnttaaagcttattggccatgctggtgcgggctatggggactgttctgggagggctggga

SEQ ID NO: 213 - DNA, 2394 bp, Artificial Sequence
  Description of Artificial sequences:primer
  misc_feature (1)..(2394): transcription factor dp-1(TFDP1) gene.
ggcacgaggcgtcccggcgccactcggcccagggcagggaccccgccacggccgggaccgcccggcccggccccagcccgcgcctctccgcgccgccccgcgctccgcaccgcgccctctccgcgtccccgcccgcgcggccggaccgggcagccagaaaaatcatttttcttctctgggaaggtgaacatttgtagcattgatttcccggatctggtaacatggcaaaagatgccggtctaattgaagccaacggagaactcaaggtcttcatagaccagaaccttagtcccgggaaaggcgtggtgtccctcgtggccgttcacccctccaccgtcaacccgctcgggaagcagctcttgccaaaaacctttggacagtccaatgtcaacattgcccagcaagtggtaattggtacgcctcagagaccggcagcgtcaaacaccctggtggtaggaagcccacacacccccagcactcactttgcctctcagaaccagccttccgactcctcaccttggtctgccgggaagcgcaacaggaaaggagagaagaatggcaagggcctacggcatttctccatgaaggtctgcgagaaggtgcagaggaaagggaccacttcctacaacgaagtggcagacgagctggttgcggagttcagtgctgccgacaaccacatcttaccaaacgagtcagcttatgaccagaaaaacataagacggcgcgtctacgatgccttaaacgtgctaatggccatgaacatcatctccaaggagaagaaggagatcaagtggattggtctgcccaccaactcggctcaggaatgtcagaacttagaggtggaaagacagaggagacttgaaagaataaaacagaaacagtctcaacttcaagaacttattctacagcaaattgccttcaagaacctggtgcagagaaaccggcatgcggagcagcaggccagccggccaccgccacccaactcagtcatccacctgcccttcatcatcgtcaacaccagcaagaagacggtcatcgactgcagcatctccaatgacaaatttgagtatctgtttaattttgacaacacatttgaaatccacgatgacatagaagtgctgaagcggatgggcatggcttgcgggctggagtcggggagctgctctgccgaagaccttaaaatggccagaagtctggtccccaaggctctggagccatacgtgacagaaatggctcagggaactgttggaggcgtgttcatcacgacggcaggttccacgtctaacggcacaaggttctctgccagtgacctgaccaacggtgcagatgggatgctggccacaagctccaatgggtctcagtacagcggctccagggtggagactccggtgtcctacgtcggggaggacgacgaggaggacgatgacttcaacgagaatgacgaggacgactgacgtcctccccacttcagattcggcttcaggaaaacgtttagcgaaaagaaactttttttttaatgtgggttttctgtttccttttggcctactcccaagaagatattggtaagctattgaatttagatatgcacctctgataagcaaggattgtttcccgtaggattaggacgtgctgtggatgtgtgttttgataccagtgtgctgatgcagagcgtttatttagttgttaggattttgtgttttcatttgctatttttctttaagtgcagagttcatttttgcccctgaaaagtttttgctgagtttgctgaagaaattgtatttcaaccacatccatgaaaataaaacacctcctgttgtggatggtgagcccctgatgccgcttatttgccgtgagtttggacggcacccctgctggcggatagcaagactctgtggagtttgttcagtggtacggtgtccaagcaaacagcagaatgcaactttctaaacagccccaagcaaacagcagaattcaactttttaaacaataaacaccatcaaccttattgactttattgtcccttaaattatattgactgttgtgattccatcaagtttgtacactcttttctctccctgttttgcagcaacaaattgcgaagtgcttttgtttgtttgttttcgtttggttaaagcttattgccatgctggtgcggctatggagactgtctggaaggcttggaatggtttattgcttatggtaaaatttgcctgatttcttacaggcagcgtttggaaaccttttattatatagttgtttacatacttataagtctatcatttaaagacatgtactgaaacaaatgtatttgtttcataagcatcttcctgtaatctattataaaattgaaattaaatatagagaatgttttaacaaaaaaaaaaaaaaaaaaaa

SEQ ID NO: 214 - DNA, 275 bp, Artificial Sequence
  Description of Artificial sequences:primer
  misc_feature (1)..(275): 3' terminal sequence from clone image:151740. interleukin 10 receptor, alpha(IL10RA) gene.
  misc_feature (4)..(5): n is a, c, g, or t
  misc_feature (7)..(7): n is a, c, g, or t
  misc_feature (10)..(10): n is a, c, g, or t
  misc_feature (22)..(22): n is a, c, g, or t
  misc_feature (28)..(28): n is a, c, g, or t
  misc_feature (48)..(48): n is a, c, g, or t
  misc_feature (85)..(85): n is a, c, g, or t
  misc_feature (99)..(99): n is a, c, g, or t
  misc_feature (116)..(116): n is a, c, g, or t
  misc_feature (167)..(167): n is a, c, g, or t
  misc_feature (200)..(200): n is a, c, g, or t
  misc_feature (239)..(239): n is a, c, g, or t
  misc_feature (246)..(246): n is a, c, g, or t
tttnntnagncttgacaatttnttggantaaaaaacatgtatcacttnttgacagagctttgtgttcaaggcacattcatacccntttcctcagcagancctcacatccctatganttagacaagtcagtcattattctgcagatgaggaaactgaggctcaaaggntaagtgacttctccaaggtcataccactggaancagcaaagtcagagctagattttcggggctcctgagatntccaganttctttcactgtgcaatgctgcctctcca

SEQ ID NO: 215 - DNA, 421 bp, Artificial Sequence
  Description of Artificial sequences:primer
  misc_feature (1)..(421): 5' terminal sequence from clone image:151740. interleukin 10 receptor, alpha(IL10RA) gene.
  misc_feature (1)..(1): n is a, c, g, or t
  misc_feature (14)..(14): n is a, c, g, or t
nattcggaacgagngggatccacccctctgccaaagtactcttaggtgccagtctggtaactgaactccctctggaggcaggcttgagggaggattcctcagggttcccttgaaagctcttttatttattttgttcatttatttattggagaggcagcattgcacagtgaaagaattctggatatctcaggagccccgaaattctaggtcctgactttgctgtttccagtggtatgaccttggagaagtcacttatcctttgagcctcagtttcctcatctgcagaataatgactgacttgtctaattcatagggatgtgaggttctgctgaggaaatgggtatgaatgtgccttgaacacaaagctctgtcaataagtgatacatgttttttattccaattaaattgttcaagaccacaa

SEQ ID NO: 216 - DNA, 3649 bp, Artificial Sequence
  Description of Artificial sequences:primer
  misc_feature (1)..(3649): interleukin 10 receptor, alpha(IL10RA) gene.
agtcccagcccaagggtagctggaggcgcgcaggccggctccgctccggccccggacgatgcggcgcgcccaggatgctgccgtgcctcgtagtgctgctggcggcgctcctcagcctccgtcttggctcagacgctcatgggacagagctgcccagccctccgtctgtgtggtttgaagcagaatttttccaccacatcctccactggacacccatcccaaatcagtctgaaagtacctgctatgaagtggcgctcctgaggtatggaatagagtcctggaactccatctccaactgtagccagaccctgtcctatgaccttaccgcagtgaccttggacctgtaccacagcaatggctaccgggccagagtgcgggctgtggacggcagccggcactccaactggaccgtcaccaacacccgcttctctgtggatgaagtgactctgacagttggcagtgtgaacctagagatccacaatggcttcatcctcgggaagattcagctacccaggcccaagatggcccccgcaaatgacacatatgaaagcatcttcagtcacttccgagagtatgagattgccattcgcaaggtgccgggaaacttcacgttcacacacaagaaagtaaaacatgaaaacttcagcctcctaacctctggagaagtgggagagttctgtgtccaggtgaaaccatctgtcgcttcccgaagtaacaaggggatgtggtctaaagaggagtgcatctccctcaccaggcagtatttcaccgtgaccaacgtcatcatcttctttgcctttgtcctgctgctctccggagccctcgcctactgcctggccctccagctgtatgtgcggcgccgaaagaagctacccagtgtcctgctcttcaagaagcccagccccttcatcttcatcagccagcgtccctccccagagacccaagacaccatccacccgcttgatgaggaggcctttttgaaggtgtccccagagctgaagaacttggacctgcacggcagcacagacagtggctttggcagcaccaagccatccctgcagactgaagagccccagttcctcctccctgaccctcacccccaggctgacagaacgctgggaaacggggagccccctgtgctgggggacagctgcagtagtggcagcagcaatagcacagacagcgggatctgcctgcaggagcccagcctgagccccagcacagggcccacctgggagcaacaggtggggagcaacagcaggggccaggatgacagtggcattgacttagttcaaaactctgagggccgggctggggacacacagggtggctcggccttgggccaccacagtcccccggagcctgaggtgcctggggaagaagacccagctgctgtggcattccagggttacctgaggcagaccagatgtgctgaagagaaggcaaccaagacaggctgcctggaggaagaatcgcccttgacagatggccttggccccaaattcgggagatgcctggttgatgaggcaggcttgcatccaccagccctggccaagggctatttgaaacaggatcctctagaaatgactctggcttcctcaggggccccaacgggacagtggaaccagcccactgaggaatggtcactcctggccttgagcagctgcagtgacctgggaatatctgactggagctttgcccatgaccttgcccctctaggctgtgtggcagccccaggtggtctcctgggcagctttaactcagacctggtcaccctgcccctcatctctagcctgcagtcaagtgagtgactcgggctgagaggctgcttttgattttagccatgcctgctcctctgcctggaccaggaggagggcccctggggcagaagttaggcacgaggcagtctgggcacttttctgcaagtccactggggctggccccagccaggccctgcagggctggtcagggtgtctggggcaggaggaggccaactcactgaactagtgcagggtatgtgggtggcactgacctgttctgttgactggggccctgcagactctggcagagctgagaagggcagggaccttctccctcctaggaactctttcctgtatcataaaggattatttgctcaggggaaccatggggctttctggagttgtggtgaggccaccaggctgaagtcagctcagacccagacctccctgcttaggccactcgagcatcagagcttccagcaggaggaagggctgtaggaatggaagcttcagggccttgctgctggggtcatttttaggggaaaaaggaggatatgatggtcacatggggaacctcccctcatcgggcctctggggcaggaagcttgtcactggaagatcttaaggtatatattttctggacactcaaacacatcataatggattcactgaggggagacaaagggagccgagaccctggatggggcttccagctcagaacccatccctctggtgggtacctctggcacccatctgcaaatatctccctctctccaacaaatggagtagcatccccctggggcacttgctgaggccaagccactcacatcctcactttgctgccccaccatcttgctgacaacttccagagaagccatggttttttgtattggtcataactcagccctttgggcggcctctgggcttgggcaccagctcatgccagccccagagggtcagggttggaggcctgtgcttgtgtttgctgctaatgtccagctacagacccagaggataagccactgggcactgggctggggtccctgccttgttggtgttcagctgtgtgattttggactagccacttgtcagagggcctcaatctcccatctgtgaaataaggactccacctttaggggaccctccatgtttgctgggtattagccaagctggtcctgggagaatgcagatactgtccgtggactaccaagctggcttgtttcttatgccagaggctaacagatccaatgggagtccatggtgtcatgccaagacagtatcagacacagccccagaagggggcattatgggccctgcctccccataggccatttggactctgccttcaaacaaaggcagttcagtccacaggcatggaagctgtgaggggacaggcctgtgcgtgccatccagagtcatctcagccctgcctttctctggagcattctgaaaacagatattctggcccagggaatccagccatgacccccacccctctgccaaagtactcttaggtgccagtctggtaactgaactccctctggaggcaggcttgagggaggattcctcagggttcccttgaaagctttatttatttattttgttcatttatttattggagaggcagcattgcacagtgaaagaattctggatatctcaggagccccgaaattctagctctgactttgctgtttccagtggtatgaccttggagaagtcacttatcctcttggagcctcagtttcctcatctgcagaataatgactgacttgtctaattcgtagggatgtgaggttctgctgaggaaatgggtatgaatgtgccttgaacacaaagctctgtcaataagtgatacatgttttttattccaataaattgtcaagaccaca

SEQ ID NO: 217 - DNA, 287 bp, Artificial Sequence
  Description of Artificial sequences:primer
  misc_feature (1)..(287): 3' terminal sequence from clone image:152467. protein kinase lyk5(LYK5) gene.
  misc_feature (6)..(6): n is a, c, g, or t
  misc_feature (23)..(23): n is a, c, g, or t
  misc_feature (31)..(31): n is a, c, g, or t
  misc_feature (37)..(37): n is a, c, g, or t
  misc_feature (39)..(39): n is a, c, g, or t
  misc_feature (42)..(42): n is a, c, g, or t
  misc_feature (69)..(69): n is a, c, g, or t
  misc_feature (139)..(139): n is a, c, g, or t
  misc_feature (148)..(148): n is a, c, g, or t
  misc_feature (166)..(166): n is a, c, g, or t
  misc_feature (196)..(196): n is a, c, g, or t
  misc_feature (227)..(227): n is a, c, g, or t
  misc_feature (233)..(233): n is a, c, g, or t
tttttnggttttcagcgtctctnaaaatttnaatttntnctnacaacgaaactaacacagcataagganttaagccctcaagctaggcaagacactgatggcccttggagaaagcaccagggcagctggcaggaggcgntaagatggnttcttggtgggaaaggantgaggcacacacataaaccctgggaaaganttaggtttcagggcccaagccagaagagggntaaggntggacttttccagccttagtctgtgcttaaaaagacagaaatgcccttctctgg

SEQ ID NO: 218 - DNA, 430 bp, Artificial Sequence
  Description of Artificial sequences:primer
  misc_feature (1)..(430): 5' terminal sequence from clone image:152467. protein kinase lyk5(LYK5) gene.
  misc_feature (358)..(358): n is a, c, g, or t
  misc_feature (376)..(376): n is a, c, g, or t
  misc_feature (421)..(421): n is a, c, g, or t
gtgactcgccctcccacccctaccaccgaaccttctccccccacttccaccactttgtgagcagtgccttcagcgcaacccggatgccaggcccagtgccagcaccctcctgaaccactctttcttcaagcagatcaagcgacgtgcctcagaggctttgccgaattgcttcgtcctgtcacccccatcaccaattttgagggcagccagtctcaggaccacagtggaatctttggcctggtaacaaacctgggaagagctggaggtggacgattgggagttctgagcctctgcaaactgtgcgcattctccagccagggatgcagaggccacccagaggccctttcctgagggcggncccacatttcccgccctnctggggaagatttgggtaggaaaggacatttttttccagggaaanttgattgtt

SEQ ID NO: 219 - DNA, 2654 bp, Artificial Sequence
  Description of Artificial sequences:primer
  misc_feature (1)..(2654): protein kinase lyk5(LYK5) gene.
acgttgcgtactcccctcccagcaaccggtctggcggcggcgcggcagtaaaactgaggaggcggagccaagacggtcggggctgcttgctaactccaggaacaggtttaagtttttgaaactgaagtaggcctacacagtaggaactcatgtcatttcttaccaatgatgcgagctcagagtcaatagcatccttctctaaacaggaggtcatgagtagctttctgccagagggagggtgttacgagctgctcactgtgataggcaaaggatttgaggacctgatgactgtgaatctagcaaggtacaaaccaacaggagagtacgtgactgtacggaggattaacctagaagcttgttccaatgagatggtaacattcttgcagggcgagctgcatgtctccaaactcttcaaccatcccaatatcgtgccatatcgagccacttttattgcagacaatgagctgtgggttgtcacatcattcatggcatacggttctgcaaaagatctcatctgtacacacttcatggatggcatgaatgagctggcgattgcttacatcctgcagggggtgctgaaggccctcgactacatccaccacatgggatatgtacacaggagtgtcaaagccagccacatcctgatctctgtggatgggaaggtctacctgtctggtttgcgcagcaacctcagcatgataagccatgggcagcggcagcgagtggtccacgattttcccaagtacagtgtcaaggttctgccgtggctcagccccgaggtcctccagcagaatctccagggttatgatgccaagtctgacatctacagtgtgggaatcacagcctgtgaactggccaacggccatgtcccctttaaggatatgcctgccacccagatgctgctagagaaactgaacggcacagtgccctgcctgttggataccagcaccatccccgctgaggagctgaccatgagcccttcgcgctcagtggccaactctggcctgagtgacagcctgaccaccagcaccccccggccctccaacggtgactcgccctcccacccctaccaccgaaccttctccccccacttccaccactttgtggagcagtgccttcagcgcaacccggatgccaggtatccctgctggcctgggcctgggcttcgggagagcagagggtgctcaggagggtaaggccagggtgtgaagggacttacctcccaaaggttctgcaggggaatctggagctacacacaggagggatcagctcctgggtgtgtcagaggccagcctggggagctctggccactgcttcccatgagctgagggagagggagaggggacccgaggctgaggcataagtggcaggatttcgggaagctggggacacggcagtgatgctgcggtctctcctcccctttccctccaggcccagtgccagcaccctcctgaaccactctttcttcaagcaggtatcgtagccccttcgttctggttctggttctagttctggttctaacaactcacaatccctttagctttctctcccctccctttgaatgagagaaactaccccgcttccgaagcccctgaaagacactgctccttcctctcatggagttggctccgacagcccgtctgccaccaggccatggttccttgccccatggtgtcctgggacccagagcaacaggatctgtcacccacctctctcttctcccccagatcaagcgacgtgcctcagaggctttgcccgaattgcttcgtcctgtcacccccatcaccaattttgagggcagccagtctcaggaccacagtggaatctttggcctggtaacaaacctggaagagctggaggtggacgattgggagttctgagcctctgcaaactgtgcgcattctccagccagggatgcagaggccacccagaggcccttcctgagggccggccacattcccgccctcctgggcagattgggtagaaaggacattcttccaggaaagttgactgctgactgattgggaaagaaaatcctggagagacacttcactgctccaaggcttttgagacacaagggaatctcaacaaccagggatcaggagggtccaaagccgacattcccagtcctgtgagctcaggtgacctcctccgcagaagagagatgctgctctggccctgggagctgaattccaagcccagggtttggctccttaaacccgaggaccgccacctcttcccagtgcttgcgaccagcctcattctatttaactttgctctcagatgcctcagatgctataggtcagtgaaagggcaagtagtaagctgcctgcctcccttccctcagacctctccctcataattccagagaagggcatttctgtctttttaagcacagactaaggctggaacagtccatccttatccctcttctggcttgggccctgacacctaagtctttcccacggtttatgtgtgtgcctcattcctttcccaccaagaatccatcttagcgcctcctgccagctgccctggtgctttctccaagggccatcagtgtcttgcctagcttgagggcttaagtccttatgctgtgttagtttcgttgtcagaacaaattaaaattttcagagacgcaaaaaaaaaaaaaaaaa

SEQ ID NO: 220 - DNA, 374 bp, Artificial Sequence
  Description of Artificial sequences:primer
  misc_feature (1)..(374): 3' terminal sequence from clone image:1526789. v-myb myeloblastosis viral oncogene homolog (avian)-like 1(MYBL1) gene.
tttttttttttttcagcttgtacacagatgctttattttggatgttaatatgtcaacattgtatgcaagattctcttacaatgaagttttccatatatcacaaaactcaatttagtcagggtaattgctgtattaatgtgaaaaccttacaataaaatgcagtattatgtatgtgtagtcagtttccatgcaagtatggctgctacatgttatgtctggcatttgtataacatactgaaagaaactcagaggaacaaaacagtataaaggtgacttaagatgcctgacatgtttaagataaaaaatcttgcaaaaagcaacaaagcagttaactgaaggattcaaccagtaccaacccaaatatgtattatgtc

SEQ ID NO: 221 - DNA, 384 bp, Artificial Sequence
  Description of Artificial sequences:primer
  misc_feature (1)..(384): 3' terminal sequence from clone image:153025. leukemia inhibitory factor (cholinergic differentiation factor)(LIF) gene.
  misc_feature (15)..(15): n is a, c, g, or t
  misc_feature (18)..(18): n is a, c, g, or t
  misc_feature (95)..(95): n is a, c, g, or t
  misc_feature (256)..(256): n is a, c, g, or t
  misc_feature (271)..(271): n is a, c, g, or t
  misc_feature (298)..(298): n is a, c, g, or t
  misc_feature (322)..(322): n is a, c, g, or t
  misc_feature (356)..(356): n is a, c, g, or t
  misc_feature (375)..(375): n is a, c, g, or t
caagagtagattctnttnttcatttctcttttttttcttaaaaaaaaaagtattcatttggtataaaaaataaatattttaaatatgacattgantaaataaaaataatctgtcagtatgaaacatccccacagggtacattcatcaaagaggattttgtcacccaaggccatgtgcttttcagtggaagggaaggagggaaacctctaaggccgcacggtgggcccacggagctagcacgtgggcggggactganggctggatgcccggnttgagggtggggaactagagatgactntaagggcagggaacatctgtaccntctgcagggaaattgctaccctccccgggtgccngaggttccaccccacaaantttgtctac

SEQ ID NO: 222 - DNA, 281 bp, Artificial Sequence
  Description of Artificial sequences:primer
  misc_feature (1)..(281): 5' terminal sequence from clone image:153025. leukemia inhibitory factor (cholinergic differentiation factor)(LIF) gene.
  misc_feature (208)..(208): n is a, c, g, or t
  misc_feature (270)..(270): n is a, c, g, or t
atgatatcctatttatattaacttattggtgctttcagtggccaagttaattcccctttccctggtccctactcaacaaaatatgatgatggctcccgacacaagcgccagggccagggcttagcagggcctggtctggaagtcgacaatgttacaagtggaataagccttacgggtgaagctcagagaagggtcggatctgagagantggggaggcctgagtgggagtggggggccttgctccacccccccccatcccctactgtgacntgctttagggt

SEQ ID NO: 223 - DNA, 3868 bp, Artificial Sequence
  Description of Artificial sequences:primer
  misc_feature (1)..(3868): leukemia inhibitory factor (cholinergic differentiation factor)(LIF) gene.
atgaacctctgaaaactgccggcatctgaggtttcctccaaggccctctgaagtgcagcccataatgaaggtcttggcggcaggagttgtgcccctgctgttggttctgcactggaaacatggggcggggagccccctccccatcacccctgtcaacgccacctgtgccatacgccacccatgtcacaacaacctcatgaaccagatcaggagccaactggcacagctcaatggcagtgccaatgccctctttattctctattacacagcccagggggagccgttccccaacaacctggacaagctatgtggccccaacgtgacggacttcccgcccttccacgccaacggcacggagaaggccaagctggtggagctgtaccgcatagtcgtgtaccttggcacctccctgggcaacatcacccgggaccagaagatcctcaaccccagtgccctcagcctccacagcaagctcaacgccaccgccgacatcctgcgaggcctccttagcaacgtgctgtgccgcctgtgcagcaagtaccacgtgggccatgtggacgtgacctacggccctgacacctcgggtaaggatgtcttccagaagaagaagctgggctgtcaactcctggggaagtataagcagatcatcgccgtgttggcccaggccttctagcaggaggtcttgaagtgtgctgtgaaccgagggatctcaggagttgggtccagatgtgggggcctgtccaagggtggctggggcccagggcatcgctaaacccaaatgggggctgctggcagaccccgagggtgcctggccagtccactccactctgggctgggctgtgatgaagctgagcagagtggaaacttccatagggagggagctagaagaaggtgccccttcctctgggagattgtggactggggagcgtgggctggacttctgcctctacttgtccctttggccccttgctcactttgtgcagtgaacaaactacacaagtcatctacaagagccctgaccacagggtgagacagcagggcccaggggagtggaccagcccccagcaaattatcaccatctgtgcctttgctgccccttaggttgggacttaggtgggccagaggggctaggatcccaaaggactccttgtcccctagaagtttgatgagtggaagatagagaggggcctctgggatggaaggctgtcttcttttgaggatgatcagagaacttgggcataggaacaatctggcagaagtttccagaaggaggtcacttggcattcaggctcttggggaggcagagaagccaccttcaggcctgggaaggaagacactgggaggaggagaggcctggaaagctttggtaggttcttcgttctcttccccgtgatcttccctgcagcctgggatggccagggtctgatggctggacctgcagcaggggtttgtggaggtgggtagggcaggggcaggttgctaagtcaggtgcagaggttctgagggacccaggctcttcctctgggtaaaggtctgtaagaaggggctggggtagctcagagtagcagctcacatctgaggccctgggaggtcttgtgaggtcacacagaggtacttgagggggactggaggccgtctctggtccccagggcaagggaacagcagaacttagggtcagggtctcagggaaccctgagctccaagcgtgctgtgcgtctgacctggcatgatttctatttattatgatatcctatttatattaacttattggtgctttcagtggccaagttaattcccctttccctggtccctactcaacaaaatatgatgatggctcccgacacaagcgccagggccagggcttagcagggcctggtctggaagtcgacaatgttacaagtggaataagcttacgggtgaagctcagagaagggtcggatctgagagaatggggaggcctgagtgggagtggggggccttgctccacccccatcccctactgtgacttgctttagcgtgtcagggtccaggctgcaggggctgggccaatttgtggagaggccgggtgcctttctgtcttgcttccagggggctggttcacactgttcttgggcgccccagcattgtgttgtgaggcgcactgttcctggcagatattgtgccccctggagcagtgggcaagacagtccttgtggcccaccctgtccttgtttctgtgtccccatgctgcctctgaaatagcgccctggaacaaccctgcccctgcacccagcatgctccgacacagcagggaagctcctcctgtggcccggacacccatagacggtgcggggggcctggctgggccagaccccaggaaggtggggtagactggggggatcagctgcccattgctcccaagaggaggagagggaggctgcagacgcctgggactcagaccaggaagctgtgggccctcctgctccacccccatcccactcccacccatgtctgggctcccaggcagggaacccgatctcttcctttgtgctggggccaggcgagtggagaaacgccctccagtctgagagcaggggagggaaggaggcagcagagttggggcagctgctcagagcagtgttctggcttcttctcaaaccctgagcgggctgccggcctccaagttcctccgacaagatgatggtactaattatggtacttttcactcactttgcacctttccctgtcgctctctaagcactttacctggatggcgcgtgggcagtgtgcaggcaggtcctgaggcctggggttggggtggagggtgcggcccggagttgtccatctgtccatcccaacagcaagacgaggatgtggctgttgagatgtgggccacactcacccttgtccaggatgcagggactgccttctccttcctgcttcatccggcttagcttggggctggctgcattcccccaggatgggcttcgagaaagacaaacttgtctggaaaccagagttgctgattccacccggggggcccggctgactcgcccatcacctcatctccctgtggacttgggagctctgtgccaggcccaccttgcggccctggctctgagtcgctctcccacccagcctggacttggccccatgggacccatcctcagtgctccctccagatcccgtccggcagcttggcgtccaccctgcacagcatcactgaatcacagagcctttgcgtgaaacagctctgccaggccgggagctgggtttctcttccctttttatctgctggtgtggaccacacctgggcctggccggaggaagagagagtttaccaagagagatgtctccgggcccttatttattatttaaacatttttttaaaaagcactgctagtttacttgtctctcctccccatcgtccccatcgtcctccttgtccctgacttggggcacttccaccctgacccagccagtccagctctgccttgccggctctccagagtagacatagtgtgtggggttggagctctggcacccggggaggtagcatttccctgcagatggtacagatgttcctgccttagagtcatctctagttccccacctcaatcccggcatccagccttcagtcccgcccacgtgctagctccgtgggcccaccgtgcggccttagaggtttccctccttcctttccactgaaaagcacatggccttgggtgacaaattcctctttgatgaatgtaccctgtggggatgtttcatactgacagattatttttatttattcaatgtcatatttaaaatatttattttttataccaaatgaatcacttttttttttaagaaaaaaaagagaaatgaataaagaatctactcttcg

SEQ ID NO: 224 - DNA, 444 bp, Artificial Sequence
  Description of Artificial sequences:primer
  misc_feature (1)..(444): 3' terminal sequence from clone image:153141. eukaryotic translation initiation factor 4 gamma, 3(EIF4G3) gene.
  misc_feature (23)..(23): n is a, c, g, or t
  misc_feature (86)..(86): n is a, c, g, or t
  misc_feature (159)..(159): n is a, c, g, or t
  misc_feature (243)..(243): n is a, c, g, or t
  misc_feature (350)..(350): n is a, c, g, or t
  misc_feature (389)..(389): n is a, c, g, or t
  misc_feature (395)..(395): n is a, c, g, or t
  misc_feature (424)..(424): n is a, c, g, or t
gctaaacatttttttaagtatgngtccttgtttaaaaagaaaagattaaaacagaaaatattttctataaataatacatgtatttnggttttagtgctcccgccctaaggtttgaagtttacttttatccagtacctttttcctccatgatcacctttntttctctttcccctctcccactcgtgcacacgtgggggtttctgcgagaattggccttgctgcactgtgattgggcgaagacgntgaaactttttaaaaaaatacttaaattgtttcttttgtttcattttgtgtatttgaagttttaggttatcctcagactcctcttctgcttcccgcaggccacgtgnaagaatgccgtgacaggatttcagaggccacggcccttncccatnctgctctgcgggggtcccttggcggggtntccccatttgtaggaagggg

SEQ ID NO: 225 - DNA, 445 bp, Artificial Sequence
  Description of Artificial sequences:primer
  misc_feature (1)..(445): 5' terminal sequence from clone image:153141. eukaryotic translation initiation factor 4 gamma, 3(EIF4G3) gene.
  misc_feature (355)..(355): n is a, c, g, or t
  misc_feature (412)..(412): n is a, c, g, or t
  misc_feature (424)..(424): n is a, c, g, or t
  misc_feature (431)..(431): n is a, c, g, or t
tgtctgccgaagagctgtataagcgactcgagaaactcattattgaggacaaagcgaatgatgaacagatctttgactgggtagaggctaatctagacgaaatccagatgagttcacctacattccttagagctttaatgactgctgtttgtaaagcagctattatagccgactcttctaccttcagagtggacactgctgttatcaagcagagagtgccgatcttactcaagtacctagactcagatacagagaaggaactgcaagcactttatgcactacaagcatcgatagtaaaacttgatcaacctgccaatttgctgcggatgttttttgattgtctatatgacgaggnggtgatctccgaggggtgccttctacaatggggtgtgcaggcaaggggccctgcagngcggactcgggnaggggcntggctctggaatct

SEQ ID NO: 226 - DNA, 5880 bp, Artificial Sequence
  Description of Artificial sequences:primer
  misc_feature (1)..(5880): eukaryotic translation initiation factor 4 gamma, 3(EIF4G3) gene.
caatcccacagagtattgatgaggaaactgaagtttggagcgatcacatcattttcccaaggtaacacaagtggcaagacagccgggaacccctaccccatccccttattcagcacatgaaataaacaaggggcatccaaatcttgcggcaacgcccccgggacatgcatcgtcccctggactctctcaaaccccttatccctctggacagaatgcaggtccaaccacgctggtataccctcaaacccctcagacaatgaattcacaacctcaaacccgttctccgtttttccagaggcctcaaatacagcctcctagagctaccatcccgaacagcagtccttccattcgtcctggtgcacagacacccactgcagtgtaccaggctaatcagcacatcatgatggttaaccatctgcccatgccgtacccagtgccccaggggcctcagtactgtataccacagtaccgtcatagtggccctccttatgttgggcccccccaacaatatccagttcaaccaccggggccaggtcctttttatcctggaccaggacctggggacttccccaatgcttatggaacgcctttttacccaagtcagccggtgtatcagtcagcacctatcatagtgcctacgcagcaacagccgcctccagccaagagagagaaaaaaactataagaattcgggatccaaaccagggaggtaaagacataacagaggagattatgtctggaggtggcagcagaaatcctactccacccataggaagacccacgtccacacctactcctcctcagcagctgcccagccaggtccccgagcacagccctgtggtttatgggactgtggagagcgctcatcttgctgccagcacccctgtcactgcagctagcgaccagaagcaagaggagaagccaaaaccagatccagtgttaaagtctccttccccagtccttaggctagtcctcagtggagagaagaaagaacaagaaggccagacatctgaaactactgcaatagtatccatagcagagcttcctctgcctccatcacctaccactgtttcttctgttgctcgaagtacaattgcagcccccacctcttctgctcttagtagccaaccaatattcaccactgctatagatgacagatgtgaactctcatccccaagagaagacacaattcctatacccagcctcacatcttgcacagaaacatcagaccctttaccaacaaatgaaaatgatgatgatatatgcaagaaaccctgtagtgtagcacctaatgatattccactggtttctagtactaacctaattaatgaaataaatggagttagcgaaaaattatcagccacggagagcattgtggaaatagtaaaacaggaagtattgccattgactcttgaattggagattctcgaaaatcccccagaagaaatgaaactggagtgtatcccagctcccatcaccccttccacagttccttcctttcctccaactcctccaactcctccagcttctcctcctcacactccagtcattgttcctgctgctgccactactgttagttctccgagtgctgccatcacagtccagagagtcctagaggaggacgagagcataagaacttgccttagtgaagatgcaaaagagattcagaacaaaatagaggtagaagcagatgggcaaacagaagagattttggattctcaaaacttaaattcaagaaggagccctgtcccagctcaaatagctataactgtaccaaagacatggaagaaaccaaaagatcggacccgaaccactgaagagatgttagaggcagaattggagcttaaagctgaagaggagctttccattgacaaagtacttgaatctgaacaagataaaatgagccaggggtttcatcctgaaagagacccctctgacctaaaaaaagtgaaagctgtggaagaaaatggagaagaagctgagccagtacgtaatggtgctgagagtgtttctgagggtgaaggaatagatgctaattcaggctccacagatagttctggtgatggggttacatttccatttaaaccagaatcctggaagcctactgatactgaaggtaagaagcagtatgacagggagtttctgctggacttccagttcatgcctgcctgtatacaaaaaccagagggcctgcctcctatcagtgatgtggttcttgacaagatcaaccaacccaaattgccaatgcgaactctggatcctcgaattttgcctcgaggaccagactttacaccagcctttgctgattttggaaggcagacacctggtggaagaggcgtacctttgttgaatgttgggtcacgaagatctcaacctggccaaagaagagaacccagaaagatcatcacagtttctgtaaaagaagatgtacacctgaaaaaggcagaaaatgcctggaagccaagccaaaaacgagacagccaagccgatgatcccgaaaacattaaaacccaggagctttttagaaaagttcgaagtatcttaaataaattgacaccacagatgttcaatcaactgatgaagcaagtgtcaggacttactgttgacacagaggagcggctgaaaggagttattgacctggtctttgagaaggctattgatgaacccagtttctctgtggcttacgcaaacatgtgtcgatgtctagtaacgctgaaagtacccatggcagacaagcctggtaacacagtgaatttccggaagctgctactgaaccgttgccagaaggagtttgaaaaagataaagcagatgatgatgtctttgagaagaagcagaaagaacttgaggctgccagtgctccagaggagaggacaaggcttcatgatgaactggaagaagccaaggacaaagcccggcggagatccattggcaacatcaagtttattggagaactctttaaactcaaaatgctgactgaagccatcatgcatgactgtgtggtgaagctgctaaagaaccatgatgaagaatccctggagtgcctgtgtcgcctgctcaccaccattggcaaagacttggactttgaaaaagcaaagccacgtatggaccagtactttaatcagatggagaaaattgtgaaagaaagaaaaacctcatctaggattcggttcatgcttcaagatgttatagacctaaggctgtgcaattgggtatctcgaagagcagatcaagggcctaaaactatcgaacagattcacaaagaggctaaaatagaagaacaagaagagcaaaggaaggtccagcaactcatgaccaaagagaagagaagaccaggtgtccagagagtggacgaaggtgggtggaacactgtacaaggggccaagaacagtcgggtactggacccctcaaaattcctaaaaatcactaagcctacaattgatgaaaaaattcagctggtacctaaagcacagctaggcagctggggaaaaggcagcagtggtggagcaaaggcaagtgagactgatgccttacggtcaagtgcttccagtttaaacagattctctgccctgcaacctccagcaccctcagggtccacgccatccacgcctgtagagtttgattcccgaaggaccttaactagtcgtggaagtatgggcagggagaagaatgacaagccccttccatctgcaacagctcggccaaatactttcatgaggggtggcagcagtaaagacctgctagacaatcagtctcaagaagagcagcggagagagatgctggagaccgtgaagcagctcacaggaggtgtggatgtggagaggaacagcactgaggctgagcgaaataaaacaagggagtcagcaaaaccagaaatttcagcaatgtcagctcatgacaaggctgcattatcagaagaggaactggagaggaagtcgaaatctatcattgatgaatttctacacattaatgattttaaggaagccatgcagtgtgtggaagagctgaatgcccagggcctactacatgtttttgtgagagtgggagtggagtccaccctggaaaggagccagatcaccagggatcacatgggccaactactctatcagctggtacagtcagaaaaactcagcaaacaggactttttcaaaggtttttcagaaactttggaattggcagatgacatggccattgatattccccatatttggttgtaccttgctgaactggtgacccccatgttaaaagaaggtggaatctccatgagagaacttaccatagaatttagcaaacctttacttcctgttggaagagctggggtcttgctatctgaaatattgcacctactatgcaaacaaatgagccataagaaagtgggagccttatggagggaggctgacctcagctggaaggactttttaccagaaggagaagatgtacataattttcttttggagcagaagttggacttcatagagtctgacagtccctgttcctctgaagcactttcaaagaaagaactgtctgccgaagagctgtataagcgactcgagaaactcattattgaggacaaagcgaatgatgaacagatctttgactgggtagaggctaatctagacgaaatccagatgagttcacctacattccttagagctttaatgactgctgtttgtaaagcagctattatagccgactcttctaccttcagagtggacactgctgttatcaagcagagagtgccgatcttactcaagtacctagactcagatacagagaaggaactgcaagcactttatgcactacaagcatcgatagtaaaacttgatcaacctgccaatttgctgcggatgttttttgattgtctatatgacgaggaggtgatctccgaggatgccttctacaaatgggagagcagcaaggaccctgcagagcagaatgggaagggcgtggctctgaaatctgtcacggcattcttcacgtggctgcgggaagcagaagaggagtctgaggataactaaaacttcaaatacacaaaatgaaacaaaagaaacaatttaagtatttttttaaaaagtttcacgtcttcgccaatcacagtgcagcaaggccaattctcgcagaaaccccacgtgtgcacgagtgggagaggggaaagagaaaaaaaggtgtacatggaggaaaaaggtactggataaaagtaaacttcaaaccttagggcgggagcactaaaaccaaaatacatgtattatttatagaaaatattttctgttttaatcttttctttttaaacaaggactcatacttaaaaaaatgtttagcaaaaaaaaaaaaaagttgagaacttttaatttattttaaggactgcaaatgccagtgtaattttttaatttgcagtttctgtaaacaactgtataatagaaaagcagagaaataaatttccctccccttcaagatgcacctcatgtttgttttaaggtatagcatttagtccagatttgagaaagtttggggtgaacaaggtaagaaagatttttttttttttggcatcaaatctttctgcctgcctctcagcttgcttcagaaaatttaaaaaatcacaatagtaatcaaaacatacataacattgaaacagaaggaaatgctgtggaccacagaactccaagaattgtttaaaaaaaaaaaagtgctaccctgagaaaagtactcttaatatctcttgaaatctttagagcaactttaaggcttgtaaatacatagaacaaatatttaaaaaaacaaaaagaaattgactcagtactatttcttttcactttgaaaatataaagaacaaaataaagacaaacattgcaagtttaaaaaaaaaaaaaaaaaaaaaaaaaaaaaa

SEQ ID NO: 227 - DNA, 415 bp, Artificial Sequence
  Description of Artificial sequences:primer
  misc_feature (1)..(415): 3' terminal sequence from clone image:153461. transforming growth factor beta 1 induced transcript 1(TGFB1I1) gene.
  misc_feature (8)..(8): n is a, c, g, or t
  misc_feature (98)..(98): n is a, c, g, or t
  misc_feature (140)..(140): n is a, c, g, or t
  misc_feature (166)..(166): n is a, c, g, or t
  misc_feature (178)..(178): n is a, c, g, or t
  misc_feature (194)..(194): n is a, c, g, or t
  misc_feature (202)..(202): n is a, c, g, or t
  misc_feature (225)..(225): n is a, c, g, or t
  misc_feature (287)..(287): n is a, c, g, or t
  misc_feature (336)..(336): n is a, c, g, or t
  misc_feature (371)..(371): n is a, c, g, or t
  misc_feature (376)..(376): n is a, c, g, or t
aggtggantttttgtgtttatgtaggtagaaaaagtgcacagaacagtgagggtgcagggagcaaggacgtcctggcctggcctccgattcgctgganttgcaaggaccctcccccagtaagggggcttccctcaagggngggaatagagtggaggcccgcacggnagttcttgtctntgtgcaatccactttntggtcgtntgggtttaggtctggctgggccntttctgaacttgacccctgagaactcatagtaccttaggggcgggctctccagtgggtgggncctcccgctctgagagcaaggcctcggggtctggaggacccggtctttnccgggagggtcggcggcctccgggggagaagggcnagccnagcgggcttttcaagccgaaaggagcttcaggaagaagg

SEQ ID NO: 228 - DNA, 317 bp, Artificial Sequence
  Description of Artificial sequences:primer
  misc_feature (1)..(317): 5' terminal sequence from clone image:153461. transforming growth factor beta 1 induced transcript 1(TGFB1I1) gene.
  misc_feature (149)..(149): n is a, c, g, or t
  misc_feature (158)..(158): n is a, c, g, or t
  misc_feature (205)..(205): n is a, c, g, or t
  misc_feature (237)..(237): n is a, c, g, or t
  misc_feature (242)..(242): n is a, c, g, or t
  misc_feature (270)..(270): n is a, c, g, or t
gggccaactcagccaccggtggtgagctccacaaatgagggctccccatccccaccagagccgactggcaagggcagcctagacaccatgctggggctgctgcagtccgacctcagccgccggggtgttcccacccaggccaaagctcntggtggctnctgcaataaacctattgctgggcaagtggtgacggctctgggcccgnctgggcaccccgagcacttcgtttgcggaggntgttncaccgccctgggaggcagcagcttcttngagaaggatggagcccccttctgccccgagtgctactttgagcgctt

SEQ ID NO: 229 - DNA, 368 bp, Artificial Sequence
  Description of Artificial sequences:primer
  misc_feature (1)..(368): 3' terminal sequence from clone image:153474. tight junction protein 3 (zona occludens 3)(TJP3) gene.
  misc_feature (11)..(11): n is a, c, g, or t
  misc_feature (162)..(162): n is a, c, g, or t
  misc_feature (175)..(175): n is a, c, g, or t
  misc_feature (213)..(213): n is a, c, g, or t
  misc_feature (252)..(252): n is a, c, g, or t
  misc_feature (272)..(272): n is a, c, g, or t
tgtgaaaatantttgtttattaaagaccaggcggagggaggtaaggttgtgggttctgtatgggaaactgagtcccagccccagggagggagaaggaggacggaccagctggcagcctgcgagaggtcacaggtcagtggccggaccccagtcatagccgtnttcatcggaggantccgcatcatggactcgcgtaaactttttcttcagggnttcccgttcataggttcgcatgctgtcctgtcgccactntcccggggggtgggcggctntccacctgggggccccctgatgagccgagattttcccacgatccctcgggctttggggacttatctgcctgcacgggctccgagggaccgggccag

SEQ ID NO: 230 - DNA, 446 bp, Artificial Sequence
  Description of Artificial sequences:primer
  misc_feature (1)..(446): 5' terminal sequence from clone image:153474. tight junction protein 3 (zona occludens 3)(TJP3) gene.
  misc_feature (400)..(400): n is a, c, g, or t
  misc_feature (439)..(439): n is a, c, g, or t
  misc_feature (444)..(444): n is a, c, g, or t
gccctcaaggcactgcgccagtggctggcctggcctcccgccgcagcacccgtcgcctctacgcacaagcccagaagctgcgaaaacacagcagccacctcttcacagccaccatccctctgaatggcacgagtgacacctggtaccaggagctcaaggccatcattcgagagcagcagacgcggcccatctggacggcggaagatcagctggatggctccttggaggacaacctagacctccctcaccacggcctgggccaacagcttccgctgaaccttcagcttgcgacagcgcgtttaacagcgattacggaggacggacggcgaggggcggcgcgttacacggatgggcgagggttacacagacgggcgaggggggggccttacacggatttggnttgttgagcccccgtttccagccttgggcccgttctttnggagncc

SEQ ID NO: 231 - DNA, 2859 bp, Artificial Sequence
  Description of Artificial sequences:primer
  misc_feature (1)..(2859): tight junction protein 3 (zona occludens 3)(TJP3) gene.
atgaacctgtgtggcctcatgcccatcttccccgctcccctcgaccaggtggctgacatggaggagctgaccatctgggaacagcacacggccacactgtccaaggacccccgccggggctttggcattgcgatctctggaggccgagaccggcccggtggatccatggttgtatctgacgtggtacctggagggccggcggagggcaggctacagacaggcgaccacatcgtcatggtgaacggggtttccatggagaatgccacctccgcgtttgccattcagatactcaagacctgcaccaagatggccaacatcacagtgaaacgtccccggaggatccacctgcccgccaccaaagccagcccctccagcccagggcgccaggactcggatgaagacgatgggccccagcgggtggaggaggtggaccagggccggggctatgacggcgactcatccagtggctccggccgctcctgggacgagcgctcccgccggccgaggcctggtcgccggggccgggccggcagccatgggcgtaggagcccaggtggtggctctgaggccaacgggctggccctggtgtccggctttaagcggctgccacggcaggacgtgcagatgaagcctgtgaagtcagtgctggtgaagaggagagacagcgaagagtttggcgtcaagctgggcagtcagatcttcatcaagcacattacagattcgggcctggctgcccggcaccgtgggctgcaggaaggagatctcattctacagatcaacggggtgtctagccagaacctgtcactgaacgacacccggcgactgattgagaagtcagaagggaagctaagcctgctggtgctgagagatcgtgggcagttcctggtgaacattccgcctgctgtcagtgacagcgacagctcgccattggaggaaggcgtgaccatggctgatgagatgtcctctccccctgcagacatctcggacctcgcctcggagctatcgcaggcaccaccatcccacatcccaccaccaccccggcatgctcagcggagccccgaggccagccagaccgactctcccgtggagagtccccggcttcggcgggaaagttcagtagattccagaaccatctcggaaccagatgagcaacggtcagagttgcccagggaaagcagctatgacatctacagagtgcccagcagtcagagcatggaggatcgtgggtacagccccgacacgcgtgtggtccgcttcctcaagggcaagagcatcgggctgcggctggcagggggcaatgacgtgggcatcttcgtgtccggggtgcaggcgggcagcccggccgacgggcagggcatccaggagggagatcagattctgcaggtgaatgacgtgccattccagaacctgacacgggaggaggcagtgcagttcctgctggggctgccaccaggcgaggagatggagctggtgacgcagaggaagcaggacattttctggaaaatggtgcagtcccgcgtgggtgactccttctacatccgcactcactttgagctggagcccagtccaccgtctggcctgggcttcacccgtggcgacgtcttccacgtgctggacacgctgcaccccggccccgggcagagccacgcacgaggaggccactggctggcggtgcgcatgggtcgtgacctgcgggagcaagagcggggcatcattcccaaccagagcagggcggagcagctggccagcctggaagctgcccagagggccgtgggagtcgggcccggctcctccgcgggctccaatgctcgggccgagttctggcggctgcggggtcttcgtcgaggagccaagaagaccactcagcggagccgtgaggacctctcagctctgacccgacagggccgctacccgccctacgaacgagtggtgttgcgagaagccagtttcaagcgcccggtagtgatcctgggacccgtggccgacattgctatgcagaagttgactgctgagatgcctgaccagtttgaaatcgcagagactgtgtccaggaccgacagcccctccaagatcatcaaactagacaccgtgcgggtgattgcagaaaaagacaagcatgcgctcctggatgtgaccccctccgccatcgagcgcctcaactatgtgcagtactaccccattgtggtcttcttcatccccgagagccggccggccctcaaggcactgcgccagtggctggcgcctgcctcccgccgcagcacccgtcgcctctacgcacaagcccagaagctgcgaaaacacagcagccacctcttcacagccaccatccctctgaatggcacgagtgacacctggtaccaggagctcaaggccatcattcgagagcagcagacgcggcccatctggacggcggaagatcagctggatggctccttggaggacaacctagacctccctcaccacggcctggccgacagctccgctgacctcagctgcgacagccgcgttaacagcgactacgagacggacggcgagggcggcgcgtacacggatggcgagggctacacagacggcgagggggggccctacacggatgtggatgatgagcccccggctccagccctggcccggtcctcggagcccgtgcaggcagatgagtcccagagcccgagggatcgtgggagaatctcggctcatcagggggcccaggtggacagccgccacccccagggacagtggcgacaggacagcatgcgaacctatgaacgggaagccctgaagaaaaagtttatgcgagtacatgatgcggagtcctccgatgaagacggctatgactggggtccggccactgacctgtga

SEQ ID NO: 232 - DNA, 412 bp, Artificial Sequence
  Description of Artificial sequences:primer
  misc_feature (1)..(412): 3' terminal sequence from clone image:153589. stanniocalcin 1(STC1) gene.
  misc_feature (212)..(212): n is a, c, g, or t
  misc_feature (244)..(244): n is a, c, g, or t
  misc_feature (249)..(249): n is a, c, g, or t
  misc_feature (255)..(255): n is a, c, g, or t
  misc_feature (328)..(328): n is a, c, g, or t
  misc_feature (358)..(358): n is a, c, g, or t
  misc_feature (396)..(396): n is a, c, g, or t
  misc_feature (403)..(403): n is a, c, g, or t
ccttttaacatctttatgagcatttaagacatgcatttaaataaagtttccttatcagctaactctactggggcaaccgttctaaagggatccacatcttcaaattacaatggctggagagttacatgaatgttttgtgtttgggggtggtctcaggggagcaggggaaaaacatggcagaggaagttgggtaaaagagggtactttctccngaggagaggcagaatggtcacatgggattttnttggnggggantgctgccattgcaggaatgttggggatattgattacagaagcctagtttcatgcaattttctttaaggggggntaggaaaatagggaactacttttaaaaaantcaaaccggggcacagttacacttcaaaactgggtgtntccaacnccccttaaa

SEQ ID NO: 233 - DNA, 412 bp, Artificial Sequence
  Description of Artificial sequences:primer
  misc_feature (1)..(412): 5' terminal sequence from clone image:153589. stanniocalcin 1(STC1) gene.
  misc_feature (158)..(158): n is a, c, g, or t
  misc_feature (311)..(311): n is a, c, g, or t
  misc_feature (359)..(359): n is a, c, g, or t
  misc_feature (395)..(395): n is a, c, g, or t
  misc_feature (407)..(407): n is a, c, g, or t
gaaaagcattcgtcaaagagagcttaaaatgcatcgccaacggggtcacctccaaggtcttcctcgccattcggaggtgctccactttccaaaggatgattgctgaggtgcaggaagagtgctacagcaagctgaatgtgtgcagcatcgccaagcgnaaccctgaagccatcactgaggtcgtccagctgcccaatcacttctccaacagatactataacagacttgtccgaagcctgctgggaatgtgatgaaggacacagtcaggcacaatcagagacagcctgatgggaggaaattggggcctaacntggccaggcctttttcccacatcctggcaggacaggacccattgttgncccaaaccacaccccacgggtttgacttttcaaccngggagacggcanccatt

SEQ ID NO: 234 - DNA, 3901 bp, Artificial Sequence
  Description of Artificial sequences:primer
  misc_feature (1)..(3901): stanniocalcin 1(STC1) gene.
cagtttgcaaaagccagaggtgcaagaagcagcgactgcagcagcagcagcagcagcggcggtggcagcagcagcagcagcggcggcagcagcagcagcagcggaggcaccggtggcagcagcagcatcaccagcaacaacaacaaaaaaaaatcctcatcaaatcctcacctaagctttcagtgtatccagatccacatcttcactcaagccaggagagggaaagaggaaaggggggcaggaaaaaaaaaaaacccaacaacttagcggaaacttctcagagaatgctccaaaactcagcagtgcttctggtgctggtgatcagtgcttctgcaacccatgaggcggagcagaatgactctgtgagccccaggaaatcccgagtggcggctcaaaactcagctgaagtggttcgttgcctcaacagtgctctacaggtcggctgcggggcttttgcatgcctggaaaactccacctgtgacacagatgggatgtatgacatctgtaaatccttcttgtacagcgctgctaaatttgacactcagggaaaagcattcgtcaaagagagcttaaaatgcatcgccaacggggtcacctccaaggtcttcctcgccattcggaggtgctccactttccaaaggatgattgctgaggtgcaggaagagtgctacagcaagctgaatgtgtgcagcatcgccaagcggaaccctgaagccatcactgaggtcgtccagctgcccaatcacttctccaacagatactataacagacttgtccgaagcctgctggaatgtgatgaagacacagtcagcacaatcagagacagcctgatggagaaaattgggcctaacatggccagcctcttccacatcctgcagacagaccactgtgcccaaacacacccacgagctgacttcaacaggagacgcaccaatgagccgcagaagctgaaagtcctcctcaggaacctccgaggtgaggaggactctccctcccacatcaaacgcacatcccatgagagtgcataaccagggagaggttattcacaacctcaccaaactagtatcattttaggggtgttgacacaccaattttgagtgtactgtgcctggtttgatttttttaaagtagttcctattttctatcccccttaaagaaaattgcatgaaactaggcttctgtaatcaatatcccaacattctgcaatggcagcattcccaccaacaaaatccatgtgatcattctgcctctcctcaggagaaagtaccctcttttaccaacttcctctgccatgtcttttcccctgctcccctgagaccacccccaaacacaaaacattcatgtaactctccagccattgtaatttgaagatgtggatccctttagaacggttgccccagtagagttagctgataaggaaactttatttaaatgcatgtcttaaatgctcataaagatgttaaatggaattcgtgttatgaatctgtgctggccatggacgaatatgaatgtcacatttgaattcttgatctctaatgagctagtgtcttatggtcttgatcctccaatgtctaattttctttccgacacatttaccaaattgcttgagcctggctgtccaaccagactttgagcctgcatcttcttgcatctaatgaaaaacaaaaagctaacatctttacgtactgtaactgctcagagctttaaaagtatctttaacaattgtcttaaaaccagagaatcttaaggtctaactgtggaatataaatagctgaaaactaatgtactgtacataaattccagaggactctgcttaaacaaagcagtatataataactttattgcatatagatttagttttgtaacttagctttatttttcttttcctgggaatggaataactatctcacttccagatatccacataaatgctccttgtggccttttttataactaagggggtagaagtagttttaattcaacatcaaaacttaagatgggcctgtatgagacaggaaaaaccaacaggtttatctgaaggaccccaggtaagatgttaatctcccagcccacctcaacccagaggctactcttgacttagacctatactgaaagatctctgtcacatccaactggaaattccaggaaccaaaaagagcatccctatgggcttggaccacttacagtgtgataaggcctactatacattaggaagtggtagttctttactcgtcccctttcatcggtgcctggtactctggcaaatgatgatggggtgggagactttccattaaatcaatcaggaatgagtcaatcagcctttaggtctttagtccgggggacttggggctgagagagtataaataaccctgggctgtccagccttaatagacttctcttacattttcgtcctgtagcacgctgcctgccaaagtagtcctggcagctggaccatctctgtaggatcgtaaaaaaatagaaaaaaagaaaaaaaaaagaaagaaagagggaaaaagagctggtggtttgatcatttctgccatgatgtttacaagatggcgaccaccaaagtcaaacgactaacctatctatgaacaacagtagtttctcagggtcactgtccttgaacccaacagtcccttatgagcgtcactgcccaccaaaggtcaatgtcaagagaggaagagagggaggaggggtaggactgcaggggccactccaaactcgcttaggtagaaactattggtgctcgactctcactaggctaaactcaagatttgaccaaatcgagtgatagggatcctggtgggaggagagagggcacatctccagaaaaatgaaaagcaatacaactttaccataaagcctttaaaaccagtaacgtgctgctcaaggaccaagagcaattgcagcagacccagcagcagcagcagcagcacaaacattgctgcctttgtccccacacagcctctaagcgtgctgacatcagattgttaagggcatttttatactcagaactgtcccatccccaggtccccaaacttatggacactgccttagcctcttggaaatcaggtagaccatattctaagttagactcttcccctccctcccacacttcccacccccaggcaaggctgacttctctgaatcagaaaagctattaaagtttgtgtgttgtgtccattttgcaaacccaactaagccaggaccccaatgcgacaagtagttcatgagtattcctagcaaatttctctctttcttcagttcagtagatttccttttttcttttcttttttttttttttttttttttggctgtgacctcttcaaaccgtggtacccccccttttctccccacgatgatatctatatatgtatctacaatacatatatctacacatacagaaagaagcagttctcacatgttgctagttttttgcttctctttcccccaccctactccctccaattccccccttaaacttccaaagcttcgtcttgtgtttgctgcagagtgattcgggggctgacctagaccagtttgcatgattcttctcttgtgatttggttgcactttagacatttttgtgccattatatttgcattatgtatttataatttaaatgatatttaggtttttggctgagtactggaataaacagtgagcatatctggtatatgtcattatttattgttaaattacattttttaagctccatgtgcatataaaggttatgaaacatatcatggtaatgacagatgcaagttattttatttgcttattttttataattaaagatgccatagcataatatgaagcctttggtgaattccttctaagataaaaataataataaagtgttacgttttattggtttcaaaaaaaaaaaaaaaaaaaa

SEQ ID NO: 235 - DNA, 316 bp, Artificial Sequence
  Description of Artificial sequences:primer
  misc_feature (1)..(316): 3' terminal sequence from clone image:153854. desmin(DES) gene.
  misc_feature (12)..(12): n is a, c, g, or t
  misc_feature (15)..(15): n is a, c, g, or t
  misc_feature (161)..(161): n is a, c, g, or t
  misc_feature (285)..(285): n is a, c, g, or t
  misc_feature (309)..(309): n is a, c, g, or t
ggcttgtgtttnttntctctttattgtttctctccagagcccctgcagcaggggaggggagggcgtggggaggtgggcgcccctcccaccagcctgagaccgctctctgcctctctcctctcctctcttctccagcatctcacccactttctctccttctnaatctcctgctcccacctccagcaccttcggggattccctcttgtagcccctgctttctaagtccacccggggctggggaaaggaaagtaagagaccacggggacaatttcaagccccccagtntccacaggggctagtcccctgggntacctgc

SEQ ID NO: 236 - DNA, 440 bp, Artificial Sequence
  Description of Artificial sequences:primer
  misc_feature (1)..(440): 5' terminal sequence from clone image:153854. desmin(DES) gene.
  misc_feature (383)..(383): n is a, c, g, or t
atctccccatccagacctactctgccctcaacttccgagaaaccagccctgagcaaaggggttctgaggtccataccaagaagacggtgatgatcaagaccatcgagacacgggatggggaggtcgtcagtgaggccacacagcagcagcatgaagtgctctaaagacagagaccctctgccaccagagaccgtcctcacccctgtcctcactgctccctgaagccagccttcttccatcccagggacaccacacccagccttcagtcctccccttcacagcctctggacccctcctcactgggccattccctcgtggttccccaacagcggacataggcccatccttgctgggttcacaggggcatggccccgggccacttnttgcgggaaccccagttgttgaggctttggttgtttgggcagttgagttgaggcttt

SEQ ID NO: 237 - DNA, 2236 bp, Artificial Sequence
  Description of Artificial sequences:primer
  misc_feature (1)..(2236): desmin(DES) gene.
cctcgccgcatccactctccggccggccgcctgcccgccgcctcctccgtgcgcccgccagcctcgcccgcgccgtcaccatgagccaggcctactcgtccagccagcgcgtgtcctcctaccgccgcaccttcggcggcgccccggtcttcccgctcggctccccgctgagctcgcccgtgttcccgcgggcgcctttcggctctaagggctcctccagctcggtgacgtcccgcgtgtaccaggtgtcgcgcacgtcgggaggggccgggggcctggggtcgctgcgggccagccggctggggaccacccgcacgccctcctcctacggcgcaggcgagctgctggacttctcactggccgacgcggtgaaccaggagtttctgaccacgcgcaccaacgagaaggtggagctgcaggagctcaatgaccgttcgccaatctacatggagaaggtgcgcttcctggagcagcagaacgcgctcgccgccgaagtgaaccggctcaagggccgcgagccgacgcgagtggccgagctctacgaggaggagctgcgggagctgcggcgccaggtggaggtgctcactaaccagcgcgcgcgcgtcgacgtcgagcgcgacaacctgctcgacgacctgcagcggctcaaggccaagctgcaggaggagattcagttgaaggaagaagcagagaacaatttggctgccttccgagcggacgtggatgcagctactctagctcgcattgacctggagcgcagaattgaatctctcaacgaggagatcgcgttccttaagaaagtgcatgaagaggagatccgtgagttgcaggctcagcttcaggaacagcaggtccaggtggagatggacatgtctaagccagacctcactgccgccctcagggatatccgggctcagtatgagaccatcgcggctaagaacatttctgaagctgaggagtggtacaagtcgaaggtgtcagacctgacccaggcagccaacaagaacaacgacgccctgcgccaggccaagcaggagatgatggaataccgacaccagatccagtcctacacctgcgagattgacgccctcaagggcactaacgattccctgatgaggcagatgcgggaattggaggaccgatttgccagtgaggccagtggctaccaggacaacattgcacgcctggaggaggaaatccggcacctcaaggatgagatggcccgccatctgcgcgagtaccaggacctgctcaacgtgaagatggccctggatgtggagattgccacctaccggaagctgctggagggagaggagagccggatcaatctccccatccagacctactctgccctcaacttccgagaaaccagccctgagcaaaggggttctgaggtccataccaagaagacggtgatgatcaagaccatcgagacacgggatggggaggtcgtcagtgaggccacacagcagcagcatgaagtgctctaaagacgagagaccctctgccaccagagaccgtcctcacccctgtcctcactgctccctgaagcccagccttcttcatcccaggacaccacacccagcctcagtcctccaaatcacagcctctgacccctcctcactggccatccctcgtggtccccaacagcgacatagcccatccctgcctggtcacaggcatgccccggccacctctgcggaccccagctgtgagccttggctgttggcagtgagtgagcctggctcttgtgctggatggagcccaggcgggagcggtggccctgtccctcccacctctgtgacctcaggcctacgctttggctctggagatagccccagagcagggtgttgggatactgcagggccaggactgagccccgcagacctccccagcccctagcccaggagagagaaagccaggcaggtagcctgggggactagccctgtggagactggggggcttgaaattgtccccgtggtctcttactttcctttccccagcccagggtggacttagaaagcaggggctacaagagggaatccccgaaggtgctggaggtgggagcaggagattgagaaggagagaaagtgggtgagatgctggagaagagaggagaggagagaggcagagagcggtctcaggctggtgggaggggcgcccacctccccacgccctccccccccctgctgcaggggctctggagagaaacaataaagagattcacacacaagcc

SEQ ID NO: 238 - DNA, 434 bp, Artificial Sequence
  Description of Artificial sequences:primer
  misc_feature (1)..(434): 3' terminal sequence from clone image:154172. fc fragment of igg binding protein(FCGBP) gene.
  misc_feature (10)..(10): n is a, c, g, or t
  misc_feature (120)..(120): n is a, c, g, or t
  misc_feature (147)..(147): n is a, c, g, or t
  misc_feature (197)..(197): n is a, c, g, or t
  misc_feature (241)..(241): n is a, c, g, or t
  misc_feature (249)..(249): n is a, c, g, or t
  misc_feature (405)..(405): n is a, c, g, or t
  misc_feature (421)..(421): n is a, c, g, or t
tagcttaagntatttattcaatgctctcacatttggcctctgtgacccagaaaagcggtagagcagggtaggagcacatgatgcatccttcagccactgcaacctccagagggaccaggncttcttcaggaaatcttcgttcctggnggatgactgatcagccataactgcaagacacagacatttagcacctccgnttgcagactaaacacccaccctgactgccctcatcccatgaggntccagggngcctttgccccaagaagcctgggtttccatactacatccctcaccatggggagaagtcctgcgttctccatttctccatcgttgggcttctcctggggagtcatgccaatcattgggtctgggtccccgttcaaagttttccacagggccccacanagttttcccagctggngcatttgttgaca

SEQ ID NO: 239 - DNA, 16382 bp, Artificial Sequence
  Description of Artificial sequences:primer
  misc_feature (1)..(16382): fc fragment of igg binding protein(FCGBP) gene.
ctgcagccatgggtgccctatggagctggtggatactctgggctggagcaaccctcctgtggggattgacccaggaggcttcagtggacctcaagaacactggcagagaggaattcctcacagccttcctgcagaactatcagctggcctacagcaaggcctacccccgcctccttatctccagtctgtcagagagccccgcttcagtctccatcctcagccaggcagacaacacctcaaagaaggtcacagtgaggcccggggagtcggtcatggtcaacatcagtgccaaggctgagatgataggcagcaagatcttccagcatgcggtggtgatccattctgactatgccatctctgtgcaggcactaaatgccaagcctgacacagcggagctgacactgctgcggcccatccaggccctaggcaccgagtattttgtgctcacaccccccggcacctcagccaggaatgtcaaggagtttgccgtggtggccggtgccgcaggtgcctcggtcagtgtcacgctgaaggggtcagtgacattcaatggcaagttctatccagcaggcgatgtcctaagagtgactctacagccctacaatgtggcccagctacagagctcagtggatctctcggggtcaaaggtcacagctagtagccccgtggctgtcctctctggccacagctgtgcgcagaaacatacgacctgcaaccatgtggttgagcagctgctacccacgtctgcctggggcacccactatgtagtacccacgctggcctcccaatctcgctatgatttggccttcgttgtggccagccaggccacaaagctgacctacaaccatgggggtatcactggctcccgtgggctccaggcaggtgatgtggtagagtttgaggtccggccatcctggccactctacctgtctgcaaatgtgggcatccaggtcctgttgtttggcacaggtgccataaggaatgaagtgacttatgacccctacctggtcctgatcccagatgtggcggcctactgcccagcctatgtggtcaagagtgtaccaggctgtgagggcgtggccctggtagtggcacagacgaaggctatcagcgggctgaccatagatgggcatgcagtgggggccaagctcacctgggaggctgtgccaggcagtgagttctcgtatgctgaagtggagctcggcacagctgacatgatccacacggccgaggccaccaccaacttgggactgctcaccttcgggctggccaaggctataggctacgcaacagctgctgattgcggccggactgtactgtccccagtggagccctcctgcgaaggcatgcagtgcgcagccgggcagcgctgccaggtggtaggcgggaaggccgggtgtgtggcggagtccaccgctgtctgccgcgcccagggcgacccccattacaccaccttcgacggccgtcgctacgacatgatgggcacctgttcgtacacgatggtggagctgtgcagcgaggacgacaccctgcccgccttcagcgtggaggccaagaacgagcaccggggcagccgccgcgtctcctacgtgggcctcgtcactgtgcgcgcctacagccactctgtgtcgctgacccgcggtgaagttggcttcgtcctggttgacaaccagcgctcgcgcctgccagtctccctgagtgagggtcgcctgcgtgtgtaccagagcggaccacgggccgtggtggagctggtctttgggctggtggtcacttatgactgggactgccagctggcactcagcctgcctgcacgcttccaagaccaggtgtgcgggctgtgtggcaactataatggtgacccagcagacgacttcctcacgcctgacggggctctggctcctgacgctgtggagttcgcaagtagctggaagctggatgatggggactacctgtgtgaggatggctgccagaacaactgtcccgcctgcaccccaggccaggcccaacactatgagggcgaccgactctgtggcatgctgaccaagctcgatggccccttcgctgtctgccatgacaccctggaccccaggcccttcctggagcagtgtgtatatgacctgtgtgtggtcggtggggagcggctcagcctgtgccgtggcctcagcgcctatgcccaggcctgtctggagcttggcatctcggttggggactggagatcaccagccaactgccccctgtcctgccctgccaacagccgctatgagctctgcggccctgcttgcccgacctcctgcaacggggctgcggcgccgtccaactgctccgggcgcccctgcgtggagggctgcgtgtgcctcccaggcttcgtggccagcggcggcgcctgcgtgccggcctcgtcgtgtggctgcaccttccagggtctccagctcgctccgggccaggaagtgtgggcggacgagttgtgccaaaggcgctgcacctgcaacggcgccacccatcaggtcacctgccgcgacaagcagagctgcccggcgggtgagcgctgcagcgtccagaacggcctcctgggctgctaccccgatcgcttcgggacctgccaggggtccggggacccacactatgtgagcttcgacggccggcgcttcgacttcatgggcacctgcacgtacctgctggtcggctcatgcggccagaacgcagcgctgcctgccttccgggtgctggtggaaaacgagcatcggggcagccagactgtgagctacacgcgcgccgtgcgggtggaggcccgcggggtgaaggtggccgtgcgccgggagtaccccgggcaagtgctggtggatgacgtccttcagtatctgcccttccaagcagcagatgggcaggtgcaggtgttccgacagggcagggatgccgtcgtgcgcacggactttggcctgactgtcacttatgactggaatgcacgagtgactgccaaggtgcccagcagctatgctgaggccctgtgtggactctgtgggaacttcaacggggacccagctgatgacctggctctgcggggtgggggtcaagctgccaatgcactggcctttgggaacagctggcaagaagagacgaggcccggctgtggagcaactgaaccgggtgactgtcccaagctggactccctggtggcccagcagctgcagagcaagaatgagtgtggaatccttgccgaccccaaggggcccttccgggagtgccatagcaagctggacccccagggtgccgtgcgcgactgtgtctatgaccgctgcctgctgccaggccagtctgggccactgtgtgacgcactggccacctatgctgctgcatgccaggctgctggagccacagtgcacccctggaggagtgaagaactttgcccactgagctgcccaccccacagccactatgaggcgtgttcctacggctgcccgctgtcctgtggagacctcccagtgcccgggggctgtggctcagaatgccatgagggctgcgtgtgcgatgagggctttgcgctcagtggtgagtcctgcctgcccctggcctcctgtggctgcgtacaccagggcacctaccacccaccaggccagaccttctaccctggccccggatgtgattccctttgccactgccaggagggcggcctggtgtcctgtgagtcctccagctgcggaccgcacgaggcctgccagccatccggtggcagcttgggctgtgtggccgtgggctctagcacctgccaggcgtcaggagacccccactacaccaccttcgatggccgccgcttcgacttcatgggcacctgcgtgtatgtgctggctcagacctgcggcacccggcctggcctgcatcggtttgccgtcctgcaggagaacgtggcctggggtaatgggcgagtcagtgtgaccagggtgatcacggtccaggtggcaaacttcaccctgcggctggagcagagacagtggaaggtcacggtgaacggtgtggacatgaagctgcccgtggtgctggccaacggccagatccgtgcctcccagcatggttcagatgttgtgattgagaccgacttcggcctgcgtgtggcctacgaccttgtgtactatgtgcgggtcaccgtccccggaaactactaccagcagatgtgtggcctgtgtgggaactacaacggcgaccccaaggatgacttccagaagcccaatggctcacaggcaggcaacgccaatgagttcggcaactcctgggaggaggtggtgcccgactctccctgcctgccgcccaccccttgcccgccggggagcgaggactgtatccccagccacaagtgtcctcccgagctggagaagaagtatcagaaggaggagttctgtgggctcctctccagccccacagggccactgtcctcctgccacaagctggtggatccccagggtcccttgaaagattgcatctttgatctctgcctgggtggtgggaacctgagcattctctgcagcaacatccatgcctacgtgagtgcttgccaggcggctggaggccacgtggagccctggaggactgaaactttctgtcccatggagtgccctccgaacagtcactacgagctctgtgcggacacctgctccctgggctgctcagctctcagtgcccctccacagtgccaggatgggtgtgctgagggctgccagtgtgactccggcttcctctacaatggccaagcctgcgtgcccatccagcaatgcggctgctaccacaatggtgtctactatgagccggagcagacagtcctcattgacaactgtcggcagcagtgcacgtgccatgcgggtaaaggcatggtgtgccaggaacacagctgcaagccggggcaggtgtgccagccctccggaggcatcctgagctgcgtcaccaaagacccgtgccacggcgtgacatgccggccacaggagacatgcaaggagcagggtggccagggcgtgtgcctgcccaactatgaggccacgtgctggctgtggggcgacccacactaccactccttcgatggccggaagtttgacttccagggcacctgtaactatgtgctggcaacaactggctgcccgggggtcagcacccagggcctgacacccttcaccgtcaccaccaagaaccagaaccggggcaaccctgctgtgtcctacgtgagagtcgtcaccgtggctgccctcggcaccaacatctccatccacaaggacgagatcggcaaagtccgggtgaacggtgtgctcacagccttgcctgtctctgtggccgacgggcggatttcagtgacccagggtgcatcgaaggcactgctggtggctgactttggactgcaagtcagctatgactggaactggcgggtagacgtgacgctgcccagcagctatcatggcgcagtgtgcgggctctgcggtaacatggaccgcaaccccaacaatgaccaggtcttccctaatggcacactggctccctccatacccatctggggcggcagctggcgagccccaggctgggacccactgtgttgggacgaatgtcgggggtcctgcccaacgtgccctgaggaccggttggagcagtacgagggccctggcttctgcggacccctggcccccggcacagggggccctttcaccacctgccatgctcatgtgccacctgagagcttcttcaagggctgtgttctggacgtctgcatgggtggtggggaccgtgacattctttgcaaggctctggcttcctatgtggccgcctgccaggctgctggggttgtcatcgaagactggcgggcacaggttggctgtgagatcacctgcccagaaaacagccactatgaggtctgtggcccaccctgcccggccagctgtccgtcccctgcaccccttacgacgccagccgtatgtgagggcccctgtgtggagggctgccagtgcgacgcgggtttcgtgttaagtgctgaccgctgtgttcccctcaacaacggctgcggctgctgggccaatggcacctaccacgaggcgggcagtgagttttgggctgatggcacctgctcccagtggtgtcgctgcgggcctgggggtggctcgctggtctgcacacctgccagctgtgggctgggtgaagtgtgtggcctcctgccatccggccagcacggctgccagcccgtcagcacagctgagtgccaggcgtggggtgacccccattacgtcactctggatgggcaccgattcaatttccaaggcacctgcgagtacctgctgagtgcaccctgccacggaccacccttgggggctgagaacttcactgtcactgtagccaatgagcaccggggcagccaggctgtcagctacacccgcagtgtcaccctgcaaatctacaaccacagcctgacactgagtgcccgctggccccggaagctacaggtggacggcgtgttcgtcactctgcccttccagctggactcgctcctgcacgcacacctgagcggcgccgacgtggtggtgaccacaacctcagggctctcgctggctttcgacggggacagcttcgtgcgcctgcgcgtgccggcggcgtacgcgggctctctctgtggcttatgcgggaactacaaccaggaccccgcagacgacctgaaggcggtgggcgggaagcccgccggatggcaggtgggcggcgcccagggctgcggggaatgtgtgtccaagccatgcccgtcgccgtgcaccccagagcagcaagagtccttcggcggcccggacgcctgcggcgtgatctccgccaccgacggcccgctggcgccctgccacggccttgtgccgcccgcgcagtacttccagggctgcttgctggacgcctgccaagttcagggccatcctggaggcctctgtcctgcagtggccacctacgtggcagcctgtcaggccgctggggcccagctccgcgagtggaggcggccggacttctgtcccttccagtgccctgcccacagccactacgagctctgcggtgactcctgtcctgggagctgcccgagcctgtcggcacccgagggctgtgagtcggcctgccgtgaaggctgtgtctgcgatgctggcttcgtgctcagtggtgacacgtgtgtacctgtgggccagtgtggctgcctccacgatgaccgctactacccactgggccagaccttctaccctggccctgggtgtgattccctttgccgctgccgggagggcggtgaggtgtcctgtgagccctccagctgcggcccgcatgagacctgccggccatccggtggcagcttgggctgcgtggccgtgggctctaccacctgccaggcgtcgggagatccccactacaccaccttcgatggccgccgcttcgacttcatgggcacctgcgtgtatgtgctggctcagacctgcggcacccggcctggcctacatcggtttgccgtcctgcaggagaacgtggcctggggtaatgggcgagtcagtgtgaccagggtgatcacggtccaggtggcaaacttcaccctgcggctggagcagagacagtggaaggtcacggtgaacggtgtggacatgaagctgcccgtggtgctggccaacggccagatccgtgcctcccagcatggttcagatgttgtgattgagaccgacttcggcctgcgtgtggcctacgaccttgtgtactatgtgcgggtcaccgtccctggaaactactaccagctgatgtgtggcctgtgtgggaactacaacggcgaccccaaggatgacttccagaagcccaatggctcgcaggcaggcaacgccaatgagttcggcaactcctgggaggaggtggtgcccgactctccctgcctgccgccgcccacctgcccgccggggagcgagggctgtatccccagcgaggagtgtcctcccgagctggagaagaagtatcagaaggaggagttctgtgggctcctctccagccccacagggccactgtcctcctgccacaagctggtggatccccagggtcccttgaaagattgcatctttgatctctgcctgggtggtgggaacctgagcattctctgcagcaacatccatgcctacgtgagtgcttgccaggcggctggaggccacgtggagccctggaggaatgaaactttctgtcccatggaatgccctcagaacagtcactacgagctctgtgcggacacctgctccctgggctgctcggctctcagtgcccctctgcagtgcccagatgggtgtgctgagggctgccagtgtgactccggcttcctctacaacggccaagcctgcgtgcccatccagcaatgtggctgctaccacaatggtgcctactatgagccggagcagacagtcctcattgacaactgtcggcagcagtgcacgtgccatgcgggtaaagtcgtggtgtgccaggaacacagctgcaagccggggcaggtgtgccagccctccggaggcatcctgagctgcgtcaccaaagacccgtgccacggcgtgacatgccggccacaggagacatgcaaggagcagggtggccagggtgtgtgcctgcccaactatgaggccacgtgctggctgtggggcgacccacactaccactccttcgatggccggaagtttgacttccagggcacctgtaactatgtgctggcaacaactggctgcccgggggtcagcacccagggcctgacacccttcaccgtcaccaccaagaaccagaaccggggcaaccctgctgtatcctacgtgagagtcgtcaccgtggctgccctcggcaccaacatctccatccacaaggacgagatcggcaaagtccgggtgaacggtgtgctcacagccttgcctgtctccgtggccgacgggcggatttcagtggcccagggtgcatcgaaggcactgctggtggctgactttggactgcaagtcagctatgactggaactggcgggtagacgtgacgctccccagcagctatcatggcgcagtgtgcgggctctgcggtaacatggaccgcaaccccaacaatgaccaggtcttccctaatggcacactggctccctccatacccatctggggcggcagctggcgagccccaggctgggacccactgtgttgggacgaatgtcgggggtcctgcccaacgtgccctgaggaccggttggagcagtacgagggccctggcttctgcggacccctggcccccggcacagggggccctttcaccacctgccatgctcatgtgccacctgagagcttcttcaagggctgtgttctggacgtctgcatgggtggtggggaccatgacattctttgcaaggctctggcttcctacgtggccgcctgccaggccgctggggttgtcatcgaagactggcgggcacaggttggctgtgagatcacctgcccagaaaacagccactatgaggtctgtggcccaccctgcccggccagctgtccgtcccctgcaccccttacgacgccagccgtatgtgagggcccctgtgtggagggctgccagtgcgacgcgggtttcgtgttaagtgctgaccgctgtgttcccctcaacaacggctgcggctgctgggccaatggcacctaccacgaggcgggcagtgagttttgggctgatggcacctgctcccagtggtgtcgctgcgggcctgggggtggctcgctggtctgcacacctgccagctgtgggctgggtgaagtgtgtggcctcctgccatccggccagcacggctgccagcccgtcagcacagctgagtgccaggcgtggggtgacccccattacgtcactctggatgggcaccgattcgatttccaaggcacctgcgagtacctgctgagtgcaccctgccacggaccacccttgggggctgagaacttcactgtcactgtagccaatgagcaccggggcagccaggctgtcagctacacccgcagtgtcaccctgcaaatctacaaccacagcctgacactgagtgcccgctggccccggaagctacaggtggacggcgtgttcgtcactctgcccttccagctggactcgctcctgcacgcacacctgagcggcgccgacgtggtggtgaccacaacctcagggctctcgctggctttcgacggggacagcttcgtgcgcctgcgcgtgccggcggcgtacgcgggctctctctgtggcttatgcgggaactacaaccaggaccccgcagacgacctgaaggcggtgggcgggaagcccgccggatggcaggtgggcggcgcccagggctgcggggaatgtgtgtccaagccatgcccgtcgccgtgcaccccagagcagcaagagtccttcggcggcccggacgcctgcggcgtgatctccgccaccgacggcccgctggcgccctgccacggccttgtgccgcccgcgcagtacttccagggctgcttgctggacgcctgccaagttcagggccatcctggaggcctctgtcctgcagtggccacctacgtggcagcctgtcaggccgctggggcccagctccgcgagtggaggcggccggacttctgtcccttccagtgccctgcccacagccactacgagctctgcggtgactcctgtcctgggagctgcccgagcctgtcggcacccgagggctgtgagtcggcctgccgtgaaggctgtgtctgcgatgctggcttcgtgctcagtggtgacacgtgtgtacctgtgggccagtgtggctgcctccacgatgaccgctactacccactgggccagaccttctaccctggccctgggtgtgattccctttgccgctgccgggagggcggtgaggtgtcctgtgagccctccagctgcggcccgcatgagacctgccggccatccggtggcagcttgggctgcgtggccgtgggctctaccacctgccaggcgtcgggagatccccactacaccaccttcgatggccgccgcttcgacttcatgggcacctgcgtgtatgtgctggctcagacctgcggcacccggcctggcctacatcggtttgccgtcctgcaggagaacgtggcctggggtaatgggcgagtcagtgtgaccagggtgatcacggtccaggtggcaaacttcaccctgcggctggagcagagacagtggaaggtcacggtgaacggtgtggacatgaagctgcccgtggtgctggccaacggccagatccgtgcctcccagcatggttcagatgttgtgattgagaccgacttcggcctgcgtgtggcctacgaccttgtgtactatgtgcgggtcaccgtccctggaaactactaccagctgatgtgtggcctgtgtgggaactacaacggcgaccccaaggatgacttccagaagcccaatggctcgcaggcaggcaacgccaatgagttcggcaactcctgggaggaggtggtgcccgactctccctgcctgccgccgcccacctgcccgccggggagcgagggctgtatccccagcgaggagtgtcctcccgagctggagaagaagtatcagaaggaggagttctgtgggctcctctccagccccacagggccactgtcctcctgccacaagctggtggatccccagggtcccttgaaagattgcatctttgatctctgcctgggtggtgggaacctgagcattctctgcagcaacatccatgcctacgtgagtgcttgccaggcggctggaggccacgtggagccctggaggaatgaaactttctgtcccatggaatgccctcagaacagtcactacgagctctgtgcggacacctgctccctgggctgctcggctctcagtgcccctctgcagtgcccagatgggtgtgctgagggctgccagtgtgactccggcttcctctacaacggccaagcctgcgtgcccatccagcaatgtggctgctaccacaatggtgtctactatgagccggagcagacagtcctcattgacaactgtcggcagcagtgcacgtgccatgtgggtaaagtcgtggtgtgccaggaacacagctgcaagccggggcaggtgtgccagccctccggaggcatcctgagctgcgtcaacaaagacccgtgccacggcgtgacatgccggccacaggagacatgcaaggagcagggtggccagggtgtgtgcctgcccaactatgaggccacgtgctggctgtggggcgacccacactaccactccttcgatggccggaagtttgacttccagggcacctgtaactatgtgctggcaacaactggctgcccgggggtcagcacccagggcctgacacccttcaccgtcaccaccaagaaccagaaccggggcaaccctgctgtatcctacgtgagagtcgtcaccgtggctgccctcggcaccaacatctccatccacaaggacgagatcggcaaagtccgggtgaacggtgtgctcacagccttgcctgtctccgtggccgacgggcggatttcagtggcccagggtgcatcgaaggcactgctggtggctgactttggactgcaagtcagctatgactggaactggcgggtagacgtgacgctccccagcagctatcatggcgcagtgtgcgggctctgcggtaacatggaccgcaaccccaacaatgaccaggtcttccctaatggcacactggctccctccatacccatctggggcggcagctggcgagccccaggctgggacccactgtgttgggacgaatgtcgggggtcctgcccaacgtgccctgaggaccggttggagcagtacgaggggcctggcttctgcggacccctggcatctggcacagggggccccttcaccacctgccatgctcatgtgccacctgagagcttcttcaagggctgtgttctggacgtctgcatgggtggtggggaccatgacattctttgcaaggctctggcttcctacgtggccgcctgccaggccgctggggttgtcatcgaagactggcgggcacaggttggctgtgagatcacctgcccagaaaacagccactatgaggtctgtggcccaccctgcccggccagctgtccgtcccctgcaccccttacgacgccagccgtatgtgagggcccctgtgtggagggctgccagtgcgacgcgggtttcgtgttaagtgctgaccgctgtgttcccctcaacaacggctgcggctgctgggccaatggcacctaccacgaggcgggcagtgagttttgggctgatggcacctgctcccagtggtgtcgctgcgggcctgggggtggctcgctggtctgcacacctgccagctgtgggctgggtgaagtgtgtggcctcctgccatccggccagcacagctgccagcccgtcagcacagctgagtgccaggcgtggggtgacccccattacgtcactctggatgggcaccgattcgatttccaaggcacctgcgagtacctgctgagtgcaccctgccacggaccacccttgggggctgagaacttcactgtcactgtagccaatgagcaccggggcagccaggctgtcagctacacccgcagtgtcaccctgcaaatctacaaccacagcctgacactgagtgcccgctggccccggaagctacaggtcgacggcgtgttcgtggctctgcctttccagctggactcgctcctgcacgcacacctgagcggcgccgacgtggtggtgaccacaacctcagggctctcgctggctttcgatggggacagcttcgtgcgcctgcgcgtgccggcggcgtacgcggcctctctctgtggcttatgcgggaactacaaccaggaccccgcagacgacctgaaggctgtgggcgggaagcccgctggatggcaggtgggcggggcccagggctgcggggaatgtgtgtccaagccatgcccgtcgccgtgcaccccagagcagcaggagtccttcggcggcccggacgcctgcggcgtgatctccgccaccgacggcccgctggcaccctgccacggccttgtgccgcccgcgcagtacttccagggctgcttgctggacgcctgccaagttcagggccatcctggaggcctctgtcctgcagtggctacctacgtggcagcctgtcaggccgctggggcccagctcggcgagtggaggcggccggacttctgtcccttgcagtgccctgcccacagccactatgagctctgcggtgactcctgccctgtgagctgcccgagcctctcagcacccgagggctgtgagtcggcctgccgtgaaggctgtgtctgcgatgctggcttcgtactcagtggtgacacctgcgtacccgtgggccagtgtggctgcctccatgatggccgctactacccactgggcgaggtcttctacccgggccctgagtgtgagcgacgctgtgagtgtgggccaggtggccatgtcacctgccaggagggcgcagcctgtgggccccatgaggagtgccggttagaggatggtgtccaggcctgtcatgccacaggctgtggccgctgcctggccaacgggggcatccactacatcacccttgatggccgtgtctacgacctgcatggctcctgctcctatgtcttggcccaagtctgccacccaaagcctggggacgaggacttttccatcgtgcttgagaagaatgcagctggacatctccaacgcctcctggttactgtggctggccaggttgtgagcctagctcaggggcagcaggtcaccgtggacggcgaggctgtggccctgcctgtggctgtgggccgcgtgcgggtgaccgccgagggccgaaacatggttctgcagacgaccaaggggctgcggcttctctttgatggcgatgcccacctcctcatgtccatccccagccccttccgtggacggctctgtggcctctgtgggaacttcaatggcaactggagtgacgactttgtcctgcccaatggctcagcagcgtccagtgtggagaccttcggggctgcatggcgggtgcccggctcctccaagggctgtggcgagggctgcgggccccaaggctgcccagtgtgcttggcagaggagactgcaccctatgagagcaacgaggcctgcgggcagctccggaacccccagggccccttcgcgacctgccaggcggtgctgagtccctctgagtacttccgccaatgcgtatacgacctgtgcgcgcaaaagggtgacaaagccttcctgtgccgcagcctggcagcctacacggcggcctgtcaggcagctggcgtggccgtgaagccctggaggacagacagcttctgcccgctccattgccccgcccacagccactactccatctgcactcgcacctgccagggatcctgtgcggctctctccggcctcacgggctgcaccacccgctgttttgagggctgtgagtgcgacgaccgcttcctgctttcccagggtgtctgcatccctgtccaagattgtggctgcacccataatggccgatacttgccggtaaactcctccctgctgacctcagactgcagcgagcgctgttcctgttcctcaagctctggcctgacatgccaggccgctggctgcccaccaggccgtgtatgtgaggtcaaggctgaagcccggaactgctgggccacccgtggtctctgtgtcctgtctgtgggtgccaacctcaccacctttgatggggcccgtggtgccaccacctctcctggtgtctatgagctctcttcccgctgcccaggactacagaataccatcccctggtaccgtgtagttgccgaagtccagatctgccatggcaaaacggaggctgtgggccaggtccacatcttcttccaggatgggatggtgacgttgactccaaacaagggtgtgtgggtgaatggtctccgagtggatctcccagctgagaagttagcatctgtgtccgtgagtcgtacacctgatggctccctgctagtccgccagaaggcaggggtccaggtgtggcttggagccaatgggaaggtggctgtgattgtcagcaatgaccatgctgggaaactgtgtggggcctgtggaaactttgacggggaccagaccaatgattggcatgactcccaggagaagccagcgatggagaaatggagagcgcaggacttctccccatgttatggctgatcagtcatccaccaggaacgaagatttcctgaagaagacctggtccctctggaggttgcggtggctgaaggatgcatcatgtgctcctaccctgctctaccgcttttctgggtcacagaggccaaatgtgagagcattgaataaatatcttaagct

SEQ ID NO: 240 - DNA, 358 bp, Artificial Sequence
  Description of Artificial sequences:primer
  misc_feature (1)..(358): 3' terminal sequence from clone image:154335. polymyositis/scleroderma autoantigen 2, 100kda(PMSCL2) gene.
  misc_feature (13)..(13): n is a, c, g, or t
  misc_feature (321)..(321): n is a, c, g, or t
  misc_feature (338)..(338): n is a, c, g, or t
  misc_feature (347)..(347): n is a, c, g, or t
caggaagaatttnaatggtttaaaaatatgtatgtacaaaagcagcaccagcatttggtgcttccggtccacaggcgccacgtgtcttccaggactatctctgtggccagttgtacctgaagcctctgtctgactttccagttggaaaggacatgcttttgtttcccaccgactgtttaatttttttggctgcaatgcatttcttgccagacggggtctgtttatttggatcaaactgagaagaaactttggatttgctgtttccagcaaaagccttgaaggtctgactgggctgtagtcgtaagggcgtaaactcttttnctggggggctctggggncctttgggnttcttgggaaa

SEQ ID NO: 241 - DNA, 86 bp, Artificial Sequence
  Description of Artificial sequences:primer
  misc_feature (1)..(86): 5' terminal sequence from clone image:154335. polymyositis/scleroderma autoantigen 2, 100kda(PMSCL2) gene.
  misc_feature (9)..(9): n is a, c, g, or t
  misc_feature (28)..(28): n is a, c, g, or t
  misc_feature (39)..(39): n is a, c, g, or t
  misc_feature (41)..(41): n is a, c, g, or t
  misc_feature (45)..(45): n is a, c, g, or t
  misc_feature (52)..(52): n is a, c, g, or t
  misc_feature (64)..(64): n is a, c, g, or t
  misc_feature (84)..(84): n is a, c, g, or t
acgaaatgnaccttttaatccagcaggnccgagagatgncnctgntcaagtntgaagttgcagncggagtgaagaagagcggancg

SEQ ID NO: 242 - DNA, 2739 bp, Artificial Sequence
  Description of Artificial sequences:primer
  misc_feature (1)..(2739): polymyositis/scleroderma autoantigen 2, 100kda(PMSCL2) gene.
gacaagctctcgcgagacgagccgtgcaggctgaaaaaatggcgccacccagtacccgggagcccagggtcctgtcggcgaccagcgcaaccaaatccgacggagagatggtgctgccaggcttcccggacgccgacagctttgtgaagtttgctcttgggtccgtggtggcagtcaccaaggcatctgggggcctaccacagtttggcgatgagtatgatttttaccgaagttttcctggcttccaagcattttgcgaaacacagggagacaggttgcttcagtgcatgagcagagtaatgcagtaccatgggtgtcgcagcaacattaaggatcgaagtaaagtgactgagctggaagacaagtttgatttactagttgatgccaatgatgtaattctggagagagtgggtattttactggatgaagcctcaggtgtaaacaagaatcaacagcctgtcctccctgccggcttgcaggtccccaaaacggtagtgtccagctggaaccgtaaggcagcagaatatggcaaaaaagcaaaatctgaaactttccggctgcttcatgcaaaaaatatcatccgacctcagctcaagtttcgagagaagattgacaattccaacacaccatttcttcctaaaatcttcatcaaacccaatgctcagaaacctctccctcaagctctctctaaggaaaggcgggaacgcccacaggatcgtcctgaggacttggacgtcccccctgcactggctgatttcatccatcagcagagaacccagcaggttgagcaagacatgtttgcacatccttatcaatatgaactaaatcactttaccccagcagatgcagtgcttcaaaagccacaaccccagttatacagacctatagaagagacaccatgccatttcatatcctccctggatgaactcgtggaactcaacgaaaagctcttgaattgtcaggaatttgcagttgacttggagcaccactcttacaggagcttcctgggactgacctgcctgatgcaaatttctactcggacggaagacttcatcattgacaccctcgagcttcgaagtgacatgtacattctcaatgagagcctcacagacccagccatcgttaaggtctttcatggtgctgattcagacatagaatggctacagaaagactttgggttgtatgtagtaaacatgtttgatactcatcaggcagcacgccttcttaacctgggcaggcactcactcgatcatctcctgaaactctactgcaacgtggactcaaacaagcaatatcagctggctgattggagaatacgccctctgcccgaggagatgctcagctacgcccgggatgacacccattacctgctatatatctatgacaaaatgaggctggagatgtgggagcgcggcaacgggcagcccgtgcagctgcaggtggtgtggcaacggagcagggacatctgcctcaagaaattcatcaaacctatcttcacggatgagtcctaccttgaactctataggaagcagaagaagcaccttaacacacagcagttgacagcctttcagctgctgtttgcctggagggataaaacagctcgcagggaagatgaaagttacggatatgtactgccaaaccacatgatgctgaaaatagctgaagaactgcctaaggaacctcagggcatcatagcttgctgcaacccagtaccgccccttgtgcggcagcagatcaacgaaatgcaccttttaatccagcaggcccgagagatgcccctgctcaagtctgaagttgcagccggagtgaagaagagcggaccgctgcccagtgctgagagattggagaatgttctctttggacctcacgactgctcccatgcccctccggatggctatccaatcatcccaaccagtggatctgtgccagttcagaagcaggcgagcctcttccctgatgaaaaagaagataacttgctgggtaccacatgcctgattgccacagctgtcatcacgttatttaatgaacctagtgctgaagacagtaaaaagggtccattgacagttgcacagaaaaaagcccagaacatcatggagtcctttgaaaatccatttaggatgatcagcaaccgttggaagctggcccaggtacaagtacaaaaagactctaaagaagctgtcaagaagaaggcagctgagcaaacagctgcccgggaacaggcaaaggaggcgtgcaaagctgcagcagaacaggccatctccgtccgacagcaggtcgtgctagaaaatgctgcaaagaagagagagcgagcaacaagcgacccaaggaccacagaacagaaacaagagaagaaacgactcaaaatttccaagaagccaaaggacccagagccaccagaaaaagagtttacgccttacgactacagccagtcagacttcaaggcttttgctggaaacagcaaatccaaagtttcttctcagtttgatccaaataaacagaccccgtctggcaagaaatgcattgcagccaaaaaaattaaacagtcggtgggaaacaaaagcatgtcctttccaactggaaagtcagacagaggcttcaggtacaactggccacagagatagtcctggaagacacgtggcgcctgtggaccggaagcaccaaatgctggtgctgcttttgtacatacatatttttaaaccattaaaattcttcctgaagaaaaaaaaaaaaaaaaaaaaa

SEQ ID NO: 243 - DNA, 457 bp, Artificial Sequence
  Description of Artificial sequences:primer
  misc_feature (1)..(457): 3' terminal sequence from clone image:154600. phospholipase c, delta 1(PLCD1) gene.
  misc_feature (45)..(45): n is a, c, g, or t
  misc_feature (300)..(300): n is a, c, g, or t
  misc_feature (302)..(302): n is a, c, g, or t
  misc_feature (306)..(306): n is a, c, g, or t
atcgtgatttttataaaaatccttgaccactcgctggccggaggntggagagggctgcagtgttattcctaacggaatgaaggacagctccagggactgggctagctcctggtccccagggaggcagcagcagacactatgttagggctgaaggcaatttgggggcctagctctgagcaagaggctgggagcagccacaccagccctgtccccacatgtggacagagggcccagccactcaggggggacccactggcttcctccagcctagtcctgggagggagatcttcacaaagaggntngctnatggatgctggtccccgttcttagacatgaggtggacatgggcggtatccttgctttgaggcttttcaagggggatggtactctgggccaatgaagtcattttttgggaggaggcttcatatttttccaccaagaagccgatgagggcaag

SEQ ID NO: 244 - DNA, 401 bp, Artificial Sequence
  Description of Artificial sequences:primer
  misc_feature (1)..(401): 5' terminal sequence from clone image:154600. phospholipase c, delta 1(PLCD1) gene.
  misc_feature (73)..(73): n is a, c, g, or t
  misc_feature (188)..(188): n is a, c, g, or t
  misc_feature (373)..(373): n is a, c, g, or t
  misc_feature (394)..(394): n is a, c, g, or t
ctgaagcccgccttcctgcgagaccccaacggcacctttaacccccgcgccctggctcaggggccctggtggnacggaagcggctcaacatcagggtcatttcggggcagcagctgccaaaagtcaacaagaataagaattcaattgtggaccccaaagtgacagtggagatccatggcgtgaccggnacgtggccagccgccagactgctgtcatcaccaacaatggtttcaacccatggtgggacacggagtttggcgtttgaggtagttgtgcctgaccttgccctcatccgcttcttggtggaagattatgatggcctcctccaagaatgactttcattgggccagagttaccatccctttgaacagcntcaaggcaagggttaccgccntgttcca

SEQ ID NO: 245 - DNA, 2627 bp, Artificial Sequence
  Description of Artificial sequences:primer
  misc_feature (1)..(2627): phospholipase c, delta 1(PLCD1) gene.
ttctggtcgcactccgctcggaccccaggccgccggtgctgtcgctactcaagtgagtcccgcggtgcccctcccgccgcgccgcccgacgggcatggactcgggccgggacttcctgaccctgcacggcctacaggatgatgaggatctacaggcgctgctgaagggcagccagctcctgaaggtgaagtccagctcatggaggagagagcggttctacaagttgcaggaggactgcaagaccatctggcaggagtcccgcaaggtcatgcggaccccggagtcccagctgttctccatcgaggacattcaggaggtgcgaatggggcaccgcacggagggtctggagaagttcgcccgtgatgtgcccgaggaccgctgcttctccattgtcttcaaggaccagcgcaatacactagacctcatcgccccatcgccagctgatgcccagcactgggtgctggggctgcacaagatcatccaccactcaggctccatggaccagcgtcagaagctacagcactggattcactcctgcttgcgaaaagctgacaaaaacaaggacaacaagatgagcttcaaggagctgcagaacttcctgaaggagctcaacatccaggtggacgacagctatgcccggaagatcttcagggagtgtgaccactcccagacagactccctggaggacgaggagattgaggccttctacaagatgctgacccagcgggtggagatcgaccgcaccttcgccgaggccgcgggcccaggggagactctgtcggtggatcagttagtgacgttcctgcagcaccagcagcgggaggaggcggcagggcctgcgctggccctctccctcattgagcgctacgagcccagcgagactaccaaggcgcagcggcagatgaccaaggacggcttcctcatgtacttactgtcggctgacggcagcgccttcagcctggcacaccgccgtgtctaccaggacatgggccagccacttagccactacctggtgtcctcttcacacaacacctacctgctggaggaccagctagccgggcccagcagcactgaagcctacatccgggcactgtgcaaaggctgccgatgcctggagcttgactgctgggacgggcccaaccaggaaccaatcatctaccacggctatactttcacttccaagatcctcttctgcgatgtgctcagggccatccgggactatgccttcaaggcgtccccctaccctgtcatcctatccctggagaaccactgcacactggagcagcagcgcgtgatggcgcggcacctgcatgccatcctgggccccatgctgttgaaccgaccactggatggggtcaccaacagcctgccctcccctgagcaactgaaggggaagatcctgctgaaggggaagaagctcggggggctcctcccccctggaggggagggtggccctgaggccactgtggtgtcagacgaagacgaggctgctgagatggaggatgaggcagtgaggagccgtgtgcagcacaagcccaaggaggacaagctcaggctagcacaggagctctctgacatggtcatttactgcaagagtgtccactttgggggcttctccagtcctggcacccctggacaggccttctacgagatggcgtccttctctgagaaccgtgcccttcgactgctccaagaatcaggaaacggctttgtccgccacaacgtggggcacctgagcagaatatacccggctggatggagaacagactcctccaactacagccccgtggagatgtggaatgggggctgccagatcgtggccctgaatttccagacacctgggccagagatggacgtgtaccaggaccgcttccaggacaacggggcctgtgggtacgtgctgaagcccgccttcctgcgagaccccaacggcacctttaacccccgcgccctggctcaggggccctggtgggcacggaagcggctcaacatcagggtcatttcggggcagcagctgccaaaagtcaacaagaataagaattcaattgtggaccccaaagtgacagtggagatccatggcgtgagccgggacgtggccagccgccagactgctgtcatcaccaacaatggtttcaacccatggtgggacacggagtttgcgtttgaggtagttgtgcctgaccttgccctcatccgcttcttggtggaagattatgatgcctcctccaagaatgacttcattggccagagtaccatccccttgaacagcctcaagcaaggataccgccatgtccacctcatgtctaagaacggggaccagcatccatcagccaccctctttgtgaagatctccctccaggactaggctggaggaacccagtggggtcccccctgagtgggctgggccctctgtccacatgtggggacagggctggtgtgcctgctcccagcctcttgctcagagctaggcccccaaattgccttcagccctaacatagtgtctgctgctgcctccctggggaccaggagctagcccagtccctggagctgtccttcattccgttaggaataacaatgcagccctctccaccctccggccagcgagtggtcaaggatttttataaaaa

SEQ ID NO: 246 - DNA, 309 bp, Artificial Sequence
  Description of Artificial sequences:primer
  misc_feature (1)..(309): 3' terminal sequence from clone image:155219. cysteine-rich protein 1 (intestinal)(CRIP1) gene.
  misc_feature (57)..(57): n is a, c, g, or t
  misc_feature (64)..(64): n is a, c, g, or t
  misc_feature (91)..(91): n is a, c, g, or t
  misc_feature (105)..(105): n is a, c, g, or t
  misc_feature (107)..(107): n is a, c, g, or t
  misc_feature (149)..(149): n is a, c, g, or t
  misc_feature (153)..(153): n is a, c, g, or t
  misc_feature (169)..(169): n is a, c, g, or t
  misc_feature (171)..(171): n is a, c, g, or t
  misc_feature (175)..(175): n is a, c, g, or t
  misc_feature (177)..(177): n is a, c, g, or t
  misc_feature (187)..(187): n is a, c, g, or t
  misc_feature (264)..(264): n is a, c, g, or t
  misc_feature (270)..(270): n is a, c, g, or t
  misc_feature (276)..(276): n is a, c, g, or t
gcattaggggcaacaagggagccctgggcatctggggacaaggcctggcatttgccnggacagnggccctgcaagcagccaaggatggggnctccaccacctggntnacttgaaagtgtggctctcggctccgcccgcccaaagccttnaggnccaaacatggctgcgnanaggngntggttgcagnagggtttgccttcgtgctcagcgtggcccccagaggtcagcgtcttcccacatttctcgcacttcaggcagggccantgccantccttncccagagaggtcaccctctcggcgaagtacacc

SEQ ID NO: 247 - DNA, 438 bp, Artificial Sequence
  Description of Artificial sequences:primer
  misc_feature (1)..(438): cysteine-rich protein 1 (intestinal)(CRIP1) gene.
ggcacgagggcccgtgccgccccagccgctgccgcctgcaccggacccggagccgccatgcccaagtgtcccaagtgcaacaaggaggtgtacttcgccgagagggtgacctctctgggcaaggactggcatcggccctgcctgaagtgcgagaaatgtgggaagacgctgacctctgggggccacgctgagcacgaaggcaaaccctactgcaaccacccctgctacgcagccatgtttgggcctaaaggctttgggcggggcggagccgagagccacactttcaagtaaaccaggtggtggagaccccatccttggctgcttgcagggccactgtccaggcaaatgccaggccttgtccccagatgcccagggctcccttgttgcccctaatgctctcagtaaacctgaacacttggaaaaaaaaaaaaaaaaaaa

SEQ ID NO: 248 - DNA, 310 bp, Artificial Sequence
  Description of Artificial sequences:primer
  misc_feature (1)..(310): 3' terminal sequence from clone image:155774. branched chain alpha-ketoacid dehydrogenase kinase(BCKDK) gene.
  misc_feature (115)..(115): n is a, c, g, or t
  misc_feature (131)..(131): n is a, c, g, or t
  misc_feature (189)..(189): n is a, c, g, or t
  misc_feature (235)..(235): n is a, c, g, or t
  misc_feature (247)..(247): n is a, c, g, or t
  misc_feature (271)..(271): n is a, c, g, or t
  misc_feature (284)..(284): n is a, c, g, or t
  misc_feature (293)..(293): n is a, c, g, or t
ataacaggtcagagtgggggttcccaggaacgagaatgacggaactggtgctggaggcctcagggtgcccacttccctgctccaagttctggaggcgaggaggcaatggaccctnttgaggcagggcagtnccagctccatgtaagtccatctgtctgggtccctgagacccaaggatgcagcagtttntggagcagggggccgccctgcctgacccgggaggtcctgcagggantgcggcccaggntggttcgggtgagcaggccaaagnttttggggtcagntccggaagntttcctcccggccatcg

SEQ ID NO: 249 - DNA, 246 bp, Artificial Sequence
  Description of Artificial sequences:primer
  misc_feature (1)..(246): 5' terminal sequence from clone image:155774. branched chain alpha-ketoacid dehydrogenase kinase(BCKDK) gene.
  misc_feature (11)..(11): n is a, c, g, or t
  misc_feature (15)..(15): n is a, c, g, or t
  misc_feature (179)..(179): n is a, c, g, or t
  misc_feature (221)..(221): n is a, c, g, or t
  misc_feature (241)..(241): n is a, c, g, or t
ctggctccggncccncgatgggagctgctctccgcgggctgagctgtcagcatcctcgacgcaccctggtccctgaagtcggagaagagcccctacccacccacacccccttgccccattttgggtcgcctgggtcctcagtcctagcggatcctcagtcctagcggccaccgggtctnaaaggagcaagacgatgatcctggcgtcggtgctgaggagcngtcccgggggcgggcttccnttccg

SEQ ID NO: 250 - DNA, 1890 bp, Artificial Sequence
  Description of Artificial sequences:primer
  misc_feature (1)..(1890): branched chain alpha-ketoacid dehydrogenase kinase(BCKDK) gene.
atctgtcgactgctaccgggcgcaggcggctgggacaatggcggtggactgttcgagcccttccgctgggacccgggccctggctccggccccgcgatgggagctgctctccgcgggctgagcctgtcagcatcctcgacgcaccctggtccctgaagtcggagaagcgcccctacccacccacacccccttgccccattttgggtcgcctgggtcctcagtcctagcggatcctcagtcctagcggccaccgggtctgaaaggagcaagacgatgatcctggcgtcggtgctgaggagcggtcccgggggcgggcttccgctccggcccctcctgggacccgcactcgcgctccgggcccgctcgacgtcggccaccgacacacaccacgtggagatggctcgggagcgctccaagaccgtcacctccttttacaaccagtcggccatcgacgcggcagcggagaagccctcagtccgcctaacgcccaccatgatgctctacgctggccgctctcaggacggcagccaccttctgaaaagtgctcggtacctgcagcaagaacttccagtgaggattgctcaccgcatcaagggcttccgctgccttcctttcatcattggctgcaaccccaccatactgcacgtgcatgagctatatatccgtgccttccagaagctgacagacttccctccgatcaaggaccaggcggacgaggcccagtactgccagctggtgcgacagctgctggatgaccacaaggatgtggtgaccctcttggcagagggcctacgtgagagccggaagcacatagaggatgaaaagctcgtccgctacttcttggacaagacgctgacttcgaggcttggaatccgcatgttggccacgcatcacctggcgctgcatgaggacaagcctgactttttcggcatcatctgtactcgtctctcaccaaagaagattattgagaagtgggtggactttgccagacgcctgtgtgagcacaagtatggcaatgcgccccgtgtccgcatcaatggccatgtggctgcccggttccccttcatccctatgccactggactacatcctgccggagctgctcaagaatgccatgagagccacaatggagagtcacctagacactccctacaatgtcccagatgtggtcatcaccatcgccaacaatgatgtcgatctgatcatcaggatctcagaccgtggtggaggaatcgctcacaaagatctggaccgggtcatggactaccacttcactactgctgaggccagcacacaggacccccggatcagccccctctttggccatctggacatgcatagtggcgcccagtcaggacccatgcacggctttggcttcgggttgcccacgtcacgggcctacgcggagtacctcggtgggtctctgcagctgcagtccctgcagggcattggcacggacgtctacctgcggctccgccacatcgatggccgggaggaaagcttccggatctgaccccacagcctttggcctgctcacccgaccagcctgggccgcattccctgcaggacctcccgggtcaggcagggcggccccctgctaccacacactgctgcatcttgggtctcagggacccagacagatggacttacatggagctgggcactgccctgcctcaacagggtccattgcctcttgcctccagaacttggagagcagggaagtgggcacccttgaggcctccagcaccagttccgtcattctcgttcctggggaacccccactctgacctgttattaaagttcacattttgaatgccctctcgggccccgtgtgtggggagggcaggtgaaaaaaaaaaaaaaaaaaaaaaaaaaaaaaaaaaaaaaaaaa

SEQ ID NO: 251 - DNA, 180 bp, Artificial Sequence
  Description of Artificial sequences:primer
  misc_feature (1)..(180): 3' terminal sequence from clone image:156505. transcription factor 3 (e2a immunoglobulin enhancer binding factors e12/e47)(TCF3) gene.
tggctggctggggagggccgcgtggttgtgcatgaggctggtgctgcctgcgaggccgtcctcggggtggctgcctccaaccaggcctgcgtgccgcccgcccagtgacatggggccggtgaaacctgaggccagcgccccgtggccaggcagcagcgtgtgcatgtcgccggctgtgcc

SEQ ID NO: 252 - DNA, 255 bp, Artificial Sequence
  Description of Artificial sequences:primer
  misc_feature (1)..(255): 3' terminal sequence from clone image:156718. zinc finger protein 463(ZNF463) gene.
  misc_feature (77)..(77): n is a, c, g, or t
  misc_feature (173)..(173): n is a, c, g, or t
  misc_feature (182)..(182): n is a, c, g, or t
  misc_feature (246)..(246): n is a, c, g, or t
gaatgtaaggactgtgggaaggcctttagtcgtggctatcaacttagtcaacatcagaaaatccatactggcgaganaccttatgaatgtaaagaatgtaagaaggccttccgttggggcaatcagcttactcaacatcaaaaaattcatactggggagaagccctacgaatntaaagactntggggaaggcttttcgatggggctcaagccttcgttatttcataaagaggattcatactgggtngaaaaaccc

SEQ ID NO: 253 - DNA, 2196 bp, Artificial Sequence
  Description of Artificial sequences:primer
  misc_feature (1)..(2196): zinc finger protein 463(ZNF463) gene.
atcccaactgcgcctgagaccttgtttcacctcctgatgtgctgggtgtggttaggcctcgagccgggagctatttgcctcccaggaggaagccagggcagggttccgcggggaatggcggtgagggagccactcgggacgcggaggccctaaaatgaagaagcttcggcctgaggcttcgggagcggcgagcagtgtctccgttgcttcctgtgccttggccttccagccatgtggtacctgctagggagcagtggtcccaaagtgacgtgagaggctgtacgctgttgtgaaaatgaccaagaagaaggcttcacaagtcacgagatggcagttttggagccagaagtgctctccgtgcacactacctggaggacaagaggaagtaacctcaagaatagaattccttttggggaagaaagagctggccttcaggaaaagcatcccggaggaggaagaagaagtgttatacgtcctaaagtaaggtttcaggccagcatccttcagaaaaagcatccccgaggaggaagacgaatcgttaaacatcttaggtcagctttaccagtgaggaaaccgacactgtgagctctagcctctcggaatttgtcttcttcagtggaaaccccgagaagactgatcagttcttcagttctaaaacaatggcccagggtttggtgacgttcgccgacgtagccatagacttttctcaggaggagtgggcctgtctgaactctgctcagagggacctgtactgggacgtgatgctggagaactacagtaacttggtctcactggatttggagtcagcatatgaaaataagagtttacctacaaaaaaaaacattcatgaaataagggcttccaaaaggaattcagatagaagaagtaaatcccttggccgtaactggatatgtgaaggtacgcttgaaagaccacagcgctccagagggaggtatgtcaatcagatgatcatcaattatgtcaaaaggcctgctactagagaaggcacccctcctagaacacatcagagacatcataaggagaattcctttgaatgtaaggactgtgggaaggcctttagtcgtggctatcaacttagtcaacatcagaaaatccatactggtgagaaaccttatgaatgtaaagaatgtaagaaggccttccgttggggcaatcagcttactcaacatcaaaaaattcatactggggagaagccctacgaatgtaaagactgtgggaaggcttttcgatggggctcaagcctcgttattcataagaggattcatactggtgaaaaaccctatgaatgtaaagactgtggaaaggcctttcggcgtggtgatgagctcactcagcaccagagattccacactggggagaaagactacgaatgcaaagactgtgggaagacctttagccgtgtgtataaacttattcagcacaagagaattcatagtggggagaagccttacgagtgtaaagactgtgggaaggcttttatttgtggttcaagcctcattcagcataaaagaattcacacaggtgagaaaccctatgaatgtcaagaatgtgggaaggcctttactcgagtcaattaccttactcagcatcagaagatccacaccggtgagaagcctcacgaatgtaaggagtgtgggaaggcctttcgctggggttcgagcctcgttaagcacgagaggatacatacgggcgagaagccgtacaagtgcacagaatgtgggaaggccttcaattgtggctatcacctcactcagcacgagagaatccacacaggcgaaaccccgtataaatgtaaggagtgtgggaaggctttcatttatggatcgagcctcgtgaaacatgagagaattcataccggggtgaaaccctatgggtgtacagaatgtgggaagagctttagtcacggccatcagcttacacaacatcagaaaacgcacagtggggcgaaatcctacgaatgtaaggagtgcgggaaggcatgtaaccacctaaaccatctccgagaacatcagaggatccacaacagttgaagagccttttgaacgcagtagcccgctcgtatctatggtttcgctttccacagtttgttacctgcagtcaactgcagttcaaaaatattaaatggaaaattccagaaataaagaattttaagtctcaaaaaaaaaaaaaaaaaaa

SEQ ID NO: 254 - DNA, 468 bp, Artificial Sequence
  Description of Artificial sequences:primer
  misc_feature (1)..(468): 3' terminal sequence from clone image:158233. membrane cofactor protein (cd46, trophoblast-lymphocyte cross-reactive antigen)(MCP) gene.
  misc_feature (383)..(383): n is a, c, g, or t
  misc_feature (401)..(401): n is a, c, g, or t
  misc_feature (427)..(427): n is a, c, g, or t
  misc_feature (460)..(460): n is a, c, g, or t
cgtcccatatctggacccagaagggacttccctgctcggctggctctcggtttctctgctttcctccggagaaataacagcgtcttccgcgccggcatggagcctcccggccgccgcgagtgtccctttccttcctggcgctttcctgggttgcttctggcggccatggtgttgctgctgtactccttctccgatgcctgtgaggagccaccaacatttgaagctatgggagctcattgggtaaaccaaaaccctactatgaggattgggtgaacgagtaggattataagtgtaaaaaagggatactttctatataccttcttctttgccacccatactattttgtgatccgggaatcatacatgggtaacctgttttcaggntgacggctgttattaggnggaacatgttccatattttacggggntccctttaaaaggggcaaggagttccctgaaangggggttt

SEQ ID NO: 255 - DNA, 370 bp, Artificial Sequence
  Description of Artificial sequences:primer
  misc_feature (1)..(370): 5' terminal sequence from clone image:158233. membrane cofactor protein (cd46, trophoblast-lymphocyte cross-reactive antigen)(MCP) gene.
  misc_feature (334)..(334): n is a, c, g, or t
  misc_feature (339)..(339): n is a, c, g, or t
  misc_feature (345)..(345): n is a, c, g, or t
  misc_feature (365)..(365): n is a, c, g, or t
ccattttcgactactggaaatcgacatttgaccactttacactctggagcagcacgactccacactgaattgtcaccacaataaatcgtgctctctccaataagtgaaaatggatctggtccaggtgcaggatcacaactataagttactgcatcaagatactcaaatacttctacttcactaaaggtgtgttttccattttttatttttggaggtggtgtacacaaaaccttttcacatattggggggcttaccgctccaaattgctactgatcctttaaggttcacaatataggatttcttcaccaattaaggtattaaccctcattacaantaagnggctcnggataacccaactcgtaggncccct

SEQ ID NO: 256 - DNA, 3371 bp, Artificial Sequence
  Description of Artificial sequences:primer
  misc_feature (1)..(3371): membrane cofactor protein (cd46, trophoblast-lymphocyte cross-reactive antigen)(MCP) gene.
gctcgggccacgcccacctgtcctgcagcactggatgctttgtgagttggggattgttgcgtcccatatctggacccagaagggacttccctgctcggctggctctcggtttctctgctttcctccggagaaataacagcgtcttccgcgccgcgcatggagcctcccggccgccgcgagtgtccctttccttcctggcgctttcctgggttgcttctggcggccatggtgttgctgctgtactccttctccgatgcctgtgaggagccaccaacatttgaagctatggagctcattggtaaaccaaaaccctactatgagattggtgaacgagtagattataagtgtaaaaaaggatacttctatatacctcctcttgccacccatactatttgtgatcggaatcatacatggctacctgtctcagatgacgcctgttatagagaaacatgtccatatatacgggatcctttaaatggccaagcagtccctgcaaatgggacttacgagtttggttatcagatgcactttatttgtaatgagggttattacttaattggtgaagaaattctatattgtgaacttaaaggatcagtagcaatttggagcggtaagcccccaatatgtgaaaaggttttgtgtacaccacctccaaaaataaaaaatggaaaacacacctttagtgaagtagaagtatttgagtatcttgatgcagtaacttatagttgtgatcctgcacctggaccagatccattttcacttattggagagagcacgatttattgtggtgacaattcagtgtggagtcgtgctgctccagagtgtaaagtggtcaaatgtcgatttccagtagtcgaaaatggaaaacagatatcaggatttggaaaaaaattttactacaaagcaacagttatgtttgaatgcgataagggtttttacctcgatggcagcgacacaattgtctgtgacagtaacagtacttgggatcccccagttccaaagtgtcttaaagtgctgcctccatctagtacaaaacctccagctttgagtcattcagtgtcgacttcttccactacaaaatctccagcgtccagtgcctcaggtcctaggcctacttacaagcctccagtctcaaattatccaggatatcctaaacctgaggaaggaatacttgacagtttggatgtttgggtcattgctgtgattgttattgccatagttgttggagttgcagtaatttgtgttgtcccgtacagatatcttcaaaggaggaagaagaaaggcacatacctaactgatgagacccacagagaagtaaaatttacttctctctgagaaggagagatgagagaaaggtttgcttttatcattaaaaggaaagcagatggtggagctgaatatgccacttaccagactaaatcaaccactccagcagagcagagaggctgaatagattccacaacctggtttgccagttcatcttttgactctattaaaatcttcaatagttgttattctgtagtttcactctcatgagtgcaactgtggcttagctaatattgcaatgtggcttgaatgtaggtagcatcctttgatgcttctttgaaacttgtatgaatttgggtatgaacagattgcctgctttcccttaaataacacttagatttattggaccagtcagcacagcatgcctggttgtattaaagcagggatatgctgtattttataaaattggcaaaattagagaaatatagttcacaatgaaattatattttctttgtaaagaaagtggcttgaaatcttttttgttcaaagattaatgccaactcttaagattattctttcaccaactatagaatgtattttatatatcgttcattgtaaaaagcccttaaaaatatgtgtatactactttggctcttgtgcataaaaacaagaacactgaaaattgggaatatgcacaaacttggcttctttaaccaagaatattattggaaaattctctaaaagttaatagggtaaattctctattttttgtaatgtgttcggtgatttcagaaagctagaaagtgtatgtgtggcatttgttttcactttttaaaacatccctaactgatcgaatatatcagtaatttcagaatcagatgcatcctttcataagaagtgagaggactctgacagccataacaggagtgccacttcatggtgcgaagtgaacactgtagtcttgttgttttcccaaagagaactccgtatgttctcttaggttgagtaacccactctgaattctggttacatgtgtttttctctccctccttaaataaagagaggggttaaacatgccctctaaaagtaggtggttttgaagagaataaattcatcagataacctcaagtcacatgagaatcttagtccatttacattgccttggctagtaaaagccatctatgtatatgtcttacctcatctcctaaaaggcagagtacaaagtaagccatgtatctcaggaaggtaacttcattttgtctatttgctgttgattgtaccaagggatggaagaagtaaatatagctcaggtagcactttatactcaggcagatctcagccctctactgagtcccttagccaagcagtttctttcaaagaagccagcaggcgaaaagcagggactgccactgcatttcatatcacactgttaaaagttgtgttttgaaattttatgtttagttgcacaaattgggccaaagaaacattgccttgaggaagatatgattggaaaatcaagagtgtagaagaataaatactgttttactgtccaaagacatgtttatagtgctctgtaaatgttcctttcctttgtagtctctggcaagatgctttaggaagataaaagtttgaggagaacaaacaggaattctgaattaagcacagagttgaagtttatacccgtttcacatgcttttcaagaatgtcgcaattactaagaagcagataatggtgttttttagaaacctaattgaagtatattcaaccaaatactttaatgtataaaataaatattatacaatatacttgtatagcagtttctgcttcacatttgattttttcaaatttaatatttatattagagatctatatatgtataaatatgtattttgtcaaatttgttacttaaatatatagagaccagttttctctggaagtttgtttaaatgacagaagcgtatatgaattcaagaaaatttaagctgcaaaaatgtatttgctataaaatgagaagtctcactgatagaggttctttattgctcattttttaaaaaatggactcttgaaatctgttaaaataaaattgtacatttggagatgtttca

SEQ ID NO: 257 - DNA, 459 bp, Artificial Sequence
  Description of Artificial sequences:primer
  misc_feature (1)..(459): 3' terminal sequence from clone image:158239. latent transforming growth factor beta binding protein 4(LTBP4) gene.
  misc_feature (139)..(139): n is a, c, g, or t
  misc_feature (294)..(294): n is a, c, g, or t
  misc_feature (328)..(328): n is a, c, g, or t
  misc_feature (386)..(386): n is a, c, g, or t
  misc_feature (393)..(393): n is a, c, g, or t
  misc_feature (404)..(404): n is a, c, g, or t
  misc_feature (416)..(416): n is a, c, g, or t
  misc_feature (426)..(426): n is a, c, g, or t
  misc_feature (431)..(431): n is a, c, g, or t
  misc_feature (439)..(439): n is a, c, g, or t
  misc_feature (444)..(444): n is a, c, g, or t
  misc_feature (451)..(451): n is a, c, g, or t
  misc_feature (458)..(458): n is a, c, g, or t
tgaactcgcccggctccttccagtgcagggcctgtccttctggccaccacctgcaccgtggcagatgcactgatgtggacgaatgcagttcgggtgcccctccctgtggtccccacggccactgcactaacaccgaagnctccttccgctgcagctgcgcgccaggctaccgggcccgttcgggtcggcccggccctgcgcagacgtgaacgagtgcctggaggggatttctgcttccctcacggcgagtgcctcaacactgacggctcctttgcctgtacttgtgcccctggntaccgacccggaccccgcggagcttctttgcctngacgttgacgagtgcagcgaggaggaccttttccagagcggcatctttaaccaacaancgacggntctttcgagtngatctgttcttngggaaaacgnggttnggccgaantttgntttttgntttgaant

SEQ ID NO: 258 - DNA, 397 bp, Artificial Sequence
  Description of Artificial sequences:primer
  misc_feature (1)..(397): 5' terminal sequence from clone image:158239. latent transforming growth factor beta binding protein 4(LTBP4) gene.
  misc_feature (1)..(1): n is a, c, g, or t
  misc_feature (236)..(236): n is a, c, g, or t
  misc_feature (329)..(329): n is a, c, g, or t
  misc_feature (359)..(359): n is a, c, g, or t
  misc_feature (366)..(366): n is a, c, g, or t
  misc_feature (377)..(377): n is a, c, g, or t
  misc_feature (382)..(382): n is a, c, g, or t
natcgatgcactccagccgctgtgtgtggtagtagtagccgttgctgcaatagcatgagtagcccggggccgtgttcacacacacgccactcttgcacacctggtctcggaagagctgacattcgtccacgtctctccggagctcaggtctccactgggcgccaggtagccccggccgtgaggcacaatgactggtactcagctgtctcggtgcccgggcatgctggatgcggcancgcttgccccagccctcacccacagtacagcagcactcctgccatgttcacattccgagccagggtgttgttcacatggcattccggggccgntgttgttcaaagtaggcattcccgggcggnccatttncccacaggggncctgnttagggtgttgttgg

SEQ ID NO: 259 - DNA, 5054 bp, Artificial Sequence
  Description of Artificial sequences:primer
  misc_feature (1)..(5054): latent transforming growth factor beta binding protein 4(LTBP4) gene.
atgggagacgtaaaagcgttgctgtttgtcgttgctgcccgggccagacgtttaggaggagccgctgcatccgagtccctggctgtctccgaagccttctgcagggtccgaagctgccagcccaaaaagtgtgcaggcccccagcggtgcctgaacccagtgcctgcagtgcccagtcccagccccagcgtgaggaagagacaggtgtccctcaactggcagccactgacgctccaggaggccagagctctactgaagcggcggcggccccgggggccagggggccggggactactgagaaggaggcccccacagcgtgcccccgctggcaaggccccggtcctgtgtcccttgatctgtcacaatggcggtgtgtgcgtgaagcctgaccgctgcttctgtcccccggacttcgctggcaagttctgccagttgcactcctcgggcgcccggcccccggccccggctgtaccaggcctcacccgctccgtgtacactatgccactggccaaccaccgcgacgacgagcacggcgtggcatctatggtgagcgtccacgtggagcacccgcaggaggcgtcggtggtggtgcaccaggtggagcgtgtgtctggcccttgggaggaggcggacgctgaggcggtggcgcgggcggaagcggcggcgcgggcggaggcggcagcgccctacacggtgttggcacagagcgcgccgcgggaggacggctactcagatgcctcgggcttcggttactgctttcgggagctgcgcggaggcgaatgcgcgtccccgctgcccgggctccggacgcaggaggtctgctgccgaggggccggcttggcctggggcgttcacgactgtcagctgtgctccgagcgcctggggaactccgaaagagtgagcgccccagatggaccttgtccaaccggctttgaaagagttaatgggtcctgcgaagatgtggatgagtgcgcgactggcgggcgctgccagcacggcgagtgtgcaaacacgcgcggcgggtacacgtgtgtgtgccccgacggctttctgctcgactcgtcccgcagcagctgcatctcccaacacgtgatctcagaggccaaagggccctgcttccgcgtgctccgcgacggcggctgttcgctgcccattctgcggaacatcactaaacagatctgctgctgcagccgcgtaggcaaggcctggggccggggctgccagctctgcccacccttcggctcagagggtttccgggagatctgcccggctggtcctggttaccactactcggcctccgacctccgctacaacaccagacccctgggccaggagccaccccgagtgtcactcagccagcctcgtaccctgccagccacctctcggccatctgcaggctttctgcccacccatcgcctggagccccggcctgaaccccggcccgatccccggcccggccctgagcttcccttgcccagcatccctgcctggactggtcctgagattcctgaatcaggtccctcctccggcatgtgtcagcgcaacccccaggtctgcggcccaggacgctgcatttcccggcccagcggctacacctgcgcttgcgactctggcttccggctcagcccccagggcacccgatgcattgatgtggacgaatgtcgccgcgtgcccccgccctgtgctcccgggcgctgcgagaactcaccaggcagcttccgctgcgtgtgcggcccgggcttccgagccggcccacgggctgcggaatgcctggatgtggacgagtgccaccgcgtgccgccgccgtgtgacctcgggcgctgcgagaacacgccaggcagcttcctgtgcgtgtgccccgccgggtaccaggctgcaccgcacggagccagctgccaggatgtggatgaatgcacccagagcccaggcctgtgtggccgagggggctgcaagaacctgcctggctctttccgctgtgtttgcccggctggcttccggggctcggcgtgtgaagaggatgtggatgagtgtgcccaggaaccgccgccctgtgggcccggccgctgtgacaacacggcaggctcctttcactgtgcctgccctgctggcttccgctcccgagggcccggggccccctgccaagatgtggatgagtgtgcccgaagccccccaccctgcacctacgggcggtgtgagaacacagaaggcagcttccagtgtgtctgccccatgggcttccaacccaacactgctggctccgagtgcgaagatgtggatgaatgtgaaaaccacctcgcatgccctgggcaggaatgtgtgaactcgcccggctccttccagtgcaggacctgtccttctggccaccacctgcaccgtggcagatgcactgatgtggacgaatgcagttcgggtgcccctccctgtggtccccacggccactgcactaacaccgaaggctccttccgctgcagctgcgcgccaggctaccgggcgccgtcgggtcggcccgggccctgcgcagacgtgaacgagtgcctggagggcgatttctgcttccctcacggcgagtgcctcaacactgacggctcctttgcctgtacttgtgcccctggctaccgacccggaccccgcggagcctcttgcctcgacgttgacgagtgcagcgaggaggacctttgccagagcggcatctgtaccaacaccgacggctccttcgagtgcatctgtcctccgggacaccgcgctggtccggacctcgcctcctgtctcgacgtggacgaatgtcgcgagcgaggtccagccctgtgcgggtcgcagcgttgtgagaactctcccggctcctaccgctgtgtccgggactgcgatcctgggtaccacgcgggccccgagggcacctgtgacgatgtggatgagtgccaagaatatggtcccgagatttgtggagcccagcgttgtgagaacacccctggctcctaccgctgtacaccagcctgtgaccctggctatcagcccacgccagggggcggatgccaggatgtggacgaatgccggaaccggtccttctgcggtgcccacgccgtgtgccagaacctgcccggctccttccagtgcctctgtgaccagggttacgagggggcacgggatgggcgtcactgcgtggatgtgaacgagtgtgaaacactacagggtgtatgtggagctgccctgtgtgaaaatgtcgaaggctccttcctctgtgtctgccccaacagcccggaagagtttgaccccatgactggacgctgtgttcccccacgaacttctgttggcatgtccccaggctcgcagccccaggcacctgttagccccgttctgcccgccaggccacctccgccacccctgtcccgccgacccagaaaacctaggaagggccctgtggggagtgggtgccgggagtgctattttgacacagcggccccggatgcatgtgacaacatcctggctcggaatgtgacatggcaggagtgctgctgtactgtgggtgagggctggggcagcggctgccgcatccagcagtgcccgggcaccgagacagctgagtaccagtcattgtgccctcacggccggggctacctggcgcccagtggagacctgagcctccggagagacgtggacgaatgtcagctcttccgagaccaggtgtgcaagagtggcgtgtgtgtgaacacggccccgggctactcatgctattgcagcaacggctactactaccacacacagcggctggagtgcatcgataatgacgagtgcgccgatgaggaaccggcctgtgagggcggccgctgtgtcaacactgtgggctcttatcactgtacctgcgagcccccactggtgctggatggctcgcagcgccgctgcgtctccaacgagagccagagcctcgatgacaatctgggagtgtgctggcaggaagtgggggctgacctcgtgtgcagccaccctcggctggaccgtcaggccacctacacagagtgctgctgcctgtatggagaggcctggggcatggactgcgccctctgccctgcgcaggactcagatgacttcgaggccctgtgcaatgtgctacgcccccccgcatatagccccccgcgaccaggtggctttggactcccctacgagtacggcccagacttaggtccaccttaccagggcctcccatatgggcctgagttgtacccaccacctgcgctaccctacgacccctacccaccgccacctgggcccttcgcccgccgggaggctccttatggggcaccccgcttcgacatgccagactttgaggacgatggtggcccctatggcgaatctgaggctcctgcgccacctggcccgggcacccgctggccctatcggtcccgggacacccgccgctccttcccagagcccgaggagcctcctgaaggtggaagctatgctggttccctggctgagccctacgaggagctggaggcggaggagtgcgggatcctggacggctgcaccaacgaccgctgcgtgcgcgtccccgaaggcttcacctgccgttgcttcgacggctaccgcctggacatgacccgcatggcctgcgttgacatcaacgagtgtgatgaggccgaggctgcctccccgctgtgcgtcaacgcgcgttgcctcaacacggatggctccttccgctgcatctgccgcccgggattcgcacccacgcaccagccgcaccactgtgcgcccgcacggccccgggcctgagccctggcacccgctggccacccacccgcgcccgccactcggggcccctgccgcgcatcctgcagcccgcttatgcgtatgtgcacggggccgcccgcctggacctggagaagggacctacggacgcctggaagctgcgacgccctgcactgctcccgcctccaccagcgcctcccactgatgtcgtggtcccgggcctggcccaggggcccctttacatgccctctcccttttataaaattttccattaaaaaccacctattttctaaaaaaaaaaaaaaaaaaaaaaa

SEQ ID NO: 260 - DNA, 398 bp, Artificial Sequence
  Description of Artificial sequences:primer
  misc_feature (1)..(398): 3' terminal sequence from clone image:1591384. meis1, myeloid ecotropic viral integration site 1 homolog (mouse)(MEIS1) gene.
tttttttttgacaaaaataatcttgtttttattttagattcagatttcattactgcactcaaacgactacaactgggcttggcgttattatacaatccaaactgtttccatcagaaacgctaagactcagtgtgcaatgattgttattaataattagctccttggtttcttgatagaaaaaggctatcaacaagcatttgtttatccacaacaaaaagtataattagcttatcccacttagtaaatcttgtatgcatgccaactcataccaaactgctacttttacaaaaaaaaattgcaataatacagttcatttttccagtcctttttgcacaaaatttatttacaatgtctacataaatgctccaaggtgggactatgaaaaaatacacacatga

SEQ ID NO: 261 - DNA, 2511 bp, Artificial Sequence
  Description of Artificial sequences:primer
  misc_feature (1)..(2511): meis1, myeloid ecotropic viral integration site 1 homolog (mouse)(MEIS1) gene.
cttttcacactggccttaaagaggatatattagaagttgaagtaggaagggagccagagaggccgatggcgcaaaggtacgacgatctaccccattacgggggcatggatggagtaggcatcccctccacgatgtatggggacccgcatgcagccaggtccatgcagccggtccaccacctgaaccacgggcctcctctgcactcgcatcagtacccgcacacagctcataccaacgccatggcccccagcatgggctcctctgtcaatgacgctttaaagagagataaagatgccatttatggacaccccctcttccctctcttagcactgatttttgagaaatgtgaattagctacttgtaccccccgcgagccgggggtggcgggcggggacgtctgctcgtcagagtcattcaatgaagatatagccgtgttcgccaaacagattcgcgcagaaaaacctctattttcttctaatccagaactggataacttgatgattcaagccatacaagtattaaggtttcatctattggaattagagaaggtacacgaattatgtgacaatttctgccaccggtatattagctgtttgaaagggaaaatgcctatcgatttggtgatagacgatagagaaggaggatcaaaatcagacagtgaagatataacaagatcagcaaatctaactgaccagccctcttggaacagagatcatgatgacacggcatctactcgttcaggaggaaccccaggcccttccagcggtggccacacgtcacacagtggggacaacagcagtgagcaaggtgatggcttggacaacagtgtagcttcccccagcacaggtgacgatgatgaccctgataaggacaaaaagcgtcacaaaaagcgtggcatctttcccaaagtagccacaaatatcatgagggcgtggctgttccagcatctaacacacccttacccttctgaagaacagaaaaagcagttggcacaagacacgggactcaccatccttcaagtgaacaattggtttattaatgcccggagaagaatagtgcagcccatgatagaccagtccaaccgagcagtaagtcaaggaacaccttataatcctgatggacagcccatgggaggtttcgtaatggacggtcagcaacatatgggaattagagcaccaggacctatgagtggaatgggcatgaatatgggcatggaggggcagtggcactacatgtaaccttcatctagttaaccaatcgcaaagcaagggggaaggctgcaaagtatgccaggggagtatgtagcccggggtggtccaatgggtgtgagtatgggacagccaagttatacccaaccccagatgcccccccatcctgctcagctgcgtcatgggccccccatgcatacgtacattcctggacaccctcaccacccaacagtgatgatgcatggaggaccgccccaccctggaatgccaatgtcagcatcaagccccacagttcttaatacaggagacccaacaatgagtggacaagtcatggacattcatgctcagtagcttaagggaatatgcattgtctgcaatggtgactgatttcaaatcatgttttttctgcaatgactgtggagttccattcttggcatctactctggaccaaggagcatccctaattcttcatagggacctttaaaaagcaggaaataccaactgaagtcaatttgggggacatgctaaataactatataagacattaagagaacaaagagtgaaatattgtaaatgctattatactgttatccatattacgttgtttcttatagattttttaaaaaaaatgtgaaatttttccacactatgtgtgttgtttccatagctcttcacttcctccagaagcctccttacattaaaaagccttacagttatcctgcaagggacaggaaggtctgatttgcaggatttttagagcattaaaataactatcaggcagaagaatctttcttctcgcctaggatttcagccatgcgcgcgctctctctctttctctctcttttcctctctctccctctttctagcctggggcttgaatttgcatgtctaattcatttactcaccatatttgaattggcctgaacagatgtaaatcgggaaggatgggaaaaactgcagtcatcaacaatgattaatcagctgttgcaggcagtgtcttaaggagactggtaggaggaggcatggaaaccaaaaggccgtgtgtttagaagcctaattgtcacatcaagcatcattgtccccatgcaacaaccaccaccttatacatcacttcctgttttaagcagctctaaaacatagactgaagatttatttttaatatgttgactttatttctgagcaaagcatcggtcatgtgtgtattttttcatagtcccaccttggagcatttatgtagacattgtaaataaattttgtgcaaaaaggactggaaaaatgaactgtattattgcaattttttttt

SEQ ID NO: 262 - DNA, 490 bp, Artificial Sequence
  Description of Artificial sequences:primer
  misc_feature (1)..(490): 3' terminal sequence from clone image:159885. angiotensin i converting enzyme (peptidyl-dipeptidase a) 1(ACE) gene.
  misc_feature (63)..(63): n is a, c, g, or t
  misc_feature (72)..(72): n is a, c, g, or t
  misc_feature (248)..(248): n is a, c, g, or t
  misc_feature (342)..(342): n is a, c, g, or t
  misc_feature (432)..(432): n is a, c, g, or t
  misc_feature (443)..(443): n is a, c, g, or t
  misc_feature (449)..(449): n is a, c, g, or t
  misc_feature (464)..(464): n is a, c, g, or t
  misc_feature (479)..(479): n is a, c, g, or t
  misc_feature (488)..(488): n is a, c, g, or t
gtccagttgtactgcggccagcccagcttctccccatgcagctcgttctccgtgcggaccagntccagcagncggcttgaagtagctcaacatggccgaggcgctcatgttgggctggcccgtgatcagctgcatggcttccggccacgcctaactgaaggcccagcttcatgggcggtcgccagggcgctgcccgggcctccttggactggtagatgtcacacttatgcagggggcccgtgtggcangctgcctggcacagtgcctcgtggaactggaactggatgatgaagctgacaaagtacctgatgtaaggcacgctagaaggaatgtgggaacttngcccctgggtcaaagtcaccttgagtctgggcacttgggggcaagaggcctgggtacttagccttaggttcaccacttctggtatagttntcttggtattnttcatnaaatacccttcaggncactaattacgaggngctaagggnaa

SEQ ID NO: 263 - DNA, 4863 bp, Artificial Sequence
  Description of Artificial sequences:primer
  misc_feature (1)..(4863): angiotensin i converting enzyme (peptidyl-dipeptidase a) 1(ACE) gene.
cgctcttattggccaggggacggtagctgcaggactctgctctcctgcggccatgggccagggttgggctactgcaggacttcccagcctcctcttcctgctgctctgctacgggcaccctctgctggtccccagccaggaggcatcccaacaggtgacagtcacccatgggacaagcagccaggcaacaaccagcagccagacaaccacccaccaggcgacggcccaccagacatcagcccagagcccaaacctggtgactgatgaggctgaggccagcaagtttgtggaggaatatgaccggacatcccaggtggtgtggaacgagtatgccgaggccaactggaactacaacaccaacatcaccacagagaccagcaagattctgctgcagaagaacatgcaaatagccaaccacaccctgaagtacggcacccaggccaggaagtttgatgtgaaccagttgcagaacaccactatcaagcggatcataaagaaggttcaggacctagaacgggcagcactgcctgcccaggagctggaggagtacaacaagatcctgttggatatggaaaccacctacagcgtggccactgtgtgccacccgaatggcagctgcctgcagctcgagccagatctgacgaatgtgatggccacgtcccggaaatatgaagacctgttatgggcatgggagggctggcgagacaaggcggggagagccatcctccagttttacccgaaatacgtggaactcatcaaccaggctgcccggctcaatggctatgtagatgcaggggactcgtggaggtctatgtacgagacaccatccctggagcaagacctggagcggctcttccaggagctgcagccactctacctcaacctgcatgcctacgtgcgccgggccctgcaccgtcactacggggcccagcacatcaacctggaggggcccattcctgctcacctgctggggaacatgtgggcgcagacctggtccaacatctatgacttggtggtgcccttcccttcagccccctcgatggacaccacagaggctatgctaaagcagggctggacgcccaggaggatgtttaaggaggctgatgatttcttcacctccctggggctgctgcccgtgcctcctgagttctggaacaagtcgatgctggagaagccaaccgacgggcgggaggtggtctgccacgcctcggcctgggacttctacaacggcaaggacttccggatcaagcagtgcaccaccgtgaacttggaggacctggtggtggcccaccacgaaatgggccacatccagtatttcatgcagtacaaagacttacctgtggccttgagggagggtgccaaccccggcttccatgaggccattggggacgtgctagccctctcagtgtctacgcccaagcacctgcacagtctcaacctgctgagcagtgagggtggcagcgacgagcatgacatcaactttctgatgaagatggcccttgacaagatcgcctttatccccttcagctacctcgtcgatcagtggcgctggagggtatttgatggaagcatcaccaaggagaactataaccaggagtggtggagcctcaggctgaagtaccagggcctctgccccccagtgcccaggactcaaggtgactttgacccaggggccaagttccacattccttctagcgtgccttacatcaggtactttgtcagcttcatcatccagttccagttccacgaggcactgtgccaggcagctggccacacgggccccctgcacaagtgtgacatctaccagtccaaggaggccgggcagcgcctggcgaccgccatgaagctgggcttcagtaggccgtggccggaagccatgcagctgatcacgggccagcccaacatgagcgcctcggccatgttgagctacttcaagccgctgctggactggctccgcacggagaacgagctgcatggggagaagctgggctggccgcagtacaactggacgccgaactccgatgacttctacaatgagaccgagaccaagatcttcctgcagttttatgaccaaacagggatttgggaccatggggcaccacatctcctgcccccatcccaagcaagaggaacaagggaagccccagtgtacatgtcaaagagggctgcaagctctgggcctcctggaagccctaaacttcctccagctgcacaaggacatggagaggtcccagttcatgatttactttggcacccaggcccacctgtttaaagtcacccagttcaaggacccggatgtgaatggcatgctgaaactcgaagtcatggccacctccagggacaaagaggagctgctgtgggcctggcagggctggcaggatgccgtgggccgccagatctgcaccaccttcgagcactatgtggagctcagcaacaaggctgcacagctcaacggaagaggctgctgagaaagagaatgagaagaggctgctgcagacaagtggacagggaaggcctctgacatttatccaagacctgaaagatgggcaaaagacgggaagcaagatgtgaaagaagagcagcctaggcagaggctccgcggcaggaggagccggtgctctggaagacctgaaagaagcccaggttacaaagacatgggggccttgtggcactccaagtatgagtcggataccctggagcaagacctggagcggctattccaggagctgcggccactctacctgaacctgcacacctacgtgcgcagggccctccaccgccactatgggcccgagctcatcgacctgagggggcccatccctgcccacctcctggagaacacgttggctcagtcctgggtcaacatcttagacccggtcctgcccttcctgaagaagatcccagaggatgtcacaaagatcatgaaagtccagcactggaagccagagaaaatgttggaagaggctgagacattcttcacctccttggcgctgccacctgccccacccagtttctggaaaaagttgatgctaatgaggccaaccgatgggcgagaggtggagtgtcacatctctgcctggaacttctaccaggacgacgatttcagctaggaggctgaggcaggagaatcactggaacctgggagccggaggctgcagtgagccaagatcgcaccattgcactccagctgggagacacagcaagactccgtctcaaaagaaaaaaaaaaaaaagaacaactgccaagaataaagaagtgcgcggaagtgaccacagaagacccgctctccatcttccacgaaatgggccattccagtacttcctgcagtacaagaacctctccatcatcttccgcgcaggtgccaacccagcctttgaagaggctgtggggtctgtgatcaccctctcggcctcctcccacaagcacctgctcaacataggcctgctcagcctctagcaccaggactcagaggatgaggtcaatttcctgatgcatattgccctggagaagatcgccttcatcccctttggctacctgatggacctccttcgctggaaggtctttgacggcaccatctggaaggacatctacaatcaggagtggtggaacctcaggttgaaataccagggcttgtgccccgctattcctcactcagaggaagactttgatccaggtgccaagttccacttttctgcaggtacttcctcagtctggtgctccagttccagttccacgaaacactgtgcaaagcctcgggccacatgggtccactgcaccagtgtgacatctacaactccaagattgccgggaagctcctgggggatgctctaaagctgggctcaagcaagccctggccagaggtcctaaagatgctgactggggagtctgaggtgtctacaaatgtcttcatgacctacttcaaacccctactgacctggctggtgacagaacatgcagcaaggggacatcttaggctggccagacttcagctgttcctttgaagaaaaagacacagacaaagtgacattcctgagtctgaagctggaccccaaccaggctaaatttgggtactgggtgctgttggccctgggctttgtcatgtctctggtggtgctggggctggcctgcaggctgcagtccctggaaaaacagtcactgactcaagacactgagatattcagcccactgcccaatgcctgcttcctgggcatagccatggaaccctgccaggctgctaaaggacagtggatgctgctgggcctctgccttgtcctgatgctgtgctcaatcagcctggccatctggattttcacacagtaaagcaggaagcctccaaggtaacccggctatgggactgcagtgcccaaggaatttctgctctggttagaaaaaggactctgcttcagtccacttctgctctggttagaaaaaggactctgcttcagtccacagtacataaaatgtactcagctatcagctctataagagctggatgcacatcaggagtgtgcccctctgtaacaactctagtcagcacaggccatggtgcacaaaagggacttggaaaatgatggaatgaccagcctgtccaacagaggggcagccaggacatctctgccctcttctcatcccccagccacagtggccaaagaggcccccactaggcactgtggctctgcatgacaaacacacatccagcccaggactctaagcctctcacctggactccagtaaaaaccttgctgagcctccttgtctatccttcctcccccacccaccattgtaaagtttatgtcaccagaatatttctttcatgtctaattgcttaagaacttggttgttcatcaattaaatctagatgt

SEQ ID NO: 264 - DNA, 291 bp, Artificial Sequence
  Description of Artificial sequences:primer
  misc_feature (1)..(291): 3' terminal sequence from clone image:159903. cd3e antigen, epsilon polypeptide (tit3 complex)(CD3E) gene.
  misc_feature (135)..(135): n is a, c, g, or t
  misc_feature (154)..(154): n is a, c, g, or t
  misc_feature (170)..(170): n is a, c, g, or t
  misc_feature (233)..(233): n is a, c, g, or t
  misc_feature (269)..(269): n is a, c, g, or t
  misc_feature (274)..(274): n is a, c, g, or t
tctacctgagggcaagagtgtgtgagaactgtcatggagatggatgtgatgtcggtggccacaattgtcatagtggacatctgcatcactgggggtcttgcttctgctggtttactactggagcaagaatagaanggccaaggccaagcctgtnacacgaggagcgggtnctggcggcaggcaaaggggacaaaacaaggagaggccaccaccttttcccaacccatactatnagcccatccggaaaggccagctggacctgtattctngcctnaatcagtagacgcatct

SEQ ID NO: 265 - DNA, 1311 bp, Artificial Sequence
  Description of Artificial sequences:primer
  misc_feature (1)..(1311): cd3e antigen, epsilon polypeptide (tit3 complex)(CD3E) gene.
gtaagtctgctggcctccgccatcttagtaaagtaacagtcccatgaaacaaagatgcagtcgggcactcactggagagttctgggcctctgcctcttatcagttggcgtttgggggcaagatggtaatgaagaaatgggtggtattacacagacaccatataaagtctccatctctggaaccacagtaatattgacatgccctcagtatcctggatctgaaatactatggcaacacaatgataaaaacataggcggtgatgaggatgataaaaacataggcagtgatgaggatcacctgtcactgaaggaattttcagaattggagcaaagtggttattatgtctgctaccccagaggaagcaaaccagaagatgcgaacttttatctctacctgagggcaagagtgtgtgagaactgcatggagatggatgtgatgtcggtggccacaattgtcatagtggacatctgcatcactgggggcttgctgctgctggtttactactggagcaagaatagaaaggccaaggccaagcctgtgacacgaggagcgggtgctggcggcaggcaaaggggacaaaacaaggagaggccaccacctgttcccaacccagactatgagcccatccggaaaggccagcgggacctgtattctggcctgaatcagagacgcatctgaccctctggagaacactgcctcccgctggcccaggtctcctctccagtccccctgcgactccctgtttcctgggctagtcttggaccccacgagagagaatcgttcctcagcctcatggtgaactcgcgccctccagcctgatcccccgctccctcctccctgccttctctgctggtacccagtcctaaaatattgctgcttcctcttcctttgaagcatcatcagtagtcacaccctcacagctggcctgccctcttgccaggatatttatttgtgctattcactcccttccctttggatgtaacttctccgttcagttccctccttttcttgcatgtaagttgtcccccatcccaaagtattccatctacttttctatcgccgtccccttttgcagccctctctggggatggactgggtaaatgttgacagaggccctgccccgttcacagatcctggccctgagccagccctgtgctcctccctcccccaacactccctaccaaccccctaatcccctactccctccaaccccccctcccactgtaggccactggatggtcatttggcatctccgtatatgtgctctggctcctcagctgagagagaaaaaaataaactgtatttggctgc

SEQ ID NO: 266 - DNA, 319 bp, Artificial Sequence
  Description of Artificial sequences:primer
  misc_feature (1)..(319): 3' terminal sequence from clone image:165818. hypothetical protein mgc39325(MGC39325) gene.
  misc_feature (3)..(3): n is a, c, g, or t
  misc_feature (6)..(6): n is a, c, g, or t
  misc_feature (141)..(141): n is a, c, g, or t
  misc_feature (143)..(143): n is a, c, g, or t
  misc_feature (254)..(254): n is a, c, g, or t
  misc_feature (259)..(259): n is a, c, g, or t
  misc_feature (261)..(261): n is a, c, g, or t
  misc_feature (317)..(317): n is a, c, g, or t
gcnttncatgtacatgtgtctattcaggccttgcggaggcgcccagaagagcatccaacacggctgccggggaaagaccgcccaccatgcccacggagaccctacagacaggtagcatggtgaagccggtcagccccgcgnanccttcacctctgctgtgcccctgcgcatcctgaacaaggggccagactacttccgcaggcaggccgagcccaaccccaagaggctcagcgccgtggagaggctggaggcancaagnanagttacgtcaagagccaggaggtgatcaacgccaagcaggagcccgtgaagcccgncg

SEQ ID NO: 267 - DNA, 340 bp, Artificial Sequence
  Description of Artificial sequences:primer
  misc_feature (1)..(340): 5' terminal sequence from clone image:165818. hypothetical protein mgc39325(MGC39325) gene.
taacgtcaggctcaccactttattccacagaaaacccagcctggttctatgttcggtcagtcattatctgtttggtagcagatcccatttactgtcccactggaatagtctcacatgtaggcaaagtggctttttatttcaaaaagattctgctctcaacttaaaagccagttgataaaacttttaattaagacacaatagcgcgggatataaaaacacaagaaccacataaatatcgaagaagttgtataccattttcatgtaaacagttttgcttacgagcaaagccctaattagattctggcctgaaacttttgggcagatgacgtcgtgttcagcc

SEQ ID NO: 268 - DNA, 2971 bp, Artificial Sequence
  Description of Artificial sequences:primer
  misc_feature (1)..(2971): hypothetical protein mgc39325(MGC39325) gene.
attttaagaaaggacagcattcctgtgacctctgcctaccatccataaaatactcattcccctctcagctctgcctgcagttgaacacaaagacctggaggagactcccacctccttcagggagaagaaaggaggcagcgaagcagattaaaggaacttgtggcttgtggcctttttgtgcaagggccgcctggaaggggagaaaagtgtatgaaagccaccgtggcggttaatgagctgtgagatgaggcgctgctgcggccgctgctgctgacactcgctcccaggctgcacccgccgcccttggcgcttcatgtacatgtgtctattcaggccttgcggaggcgcccagaagagcatccaacacggctgccggggaaagaccgcccaccatgcccacggagaccctacagacaggtagcatggtgaagccggtcagccccgcgggcaccttcacctctgctgtgcccctgcgcatcctgaacaaggggccagactacttccgcaggcaggccgagcccaaccccaagaggctcagcgccgtggagaggctggaggccgacaaggccaagtacgtcaagagccaggaggtgatcaacgccaagcaggagcccgtgaagcccgccgtgctggccaagcccccggtgtgcccggctgccaagcgcgcactgggcagccccacgctcaaagtgttcggcaaccacgccaagaccgagagcggcgtgcagagggagaacctgaagctggagatcctgaagaacatcatcaatagctccgagggctctagctcgggctcggggcacaagcacagctcccgcaactggccgccccaccggtcggaagccactgacctgcaccgtcactccttcgcggagtccctgaaggtctaccccacgcagggccgcaggagcccgcaggagggcggctcccacgtgggcaggagactgctggagcagtcagccgagtccttcctccacgtgtcccacagctcttcggacatccgcaaggtgaccagcgtgaagcccctcaaggccatcccctgcagtagctctgcccctcccctgcctcccaagcccaaaatcgcagccatcgcctccatgaagtcccccgaggccgaccctgtggaaccagcttgtggagtcagccgaagaccctccctccagcggtctaagtcagacttgagtgacagatatttccgagtggacgcggacgtggagaggttcttcaactactgtggactggacccggaagagctggaaaacctgggaatggaaaactttgcaagggctaattctgacataatatccctcaacttccgcagcgcaagtatgatcagctcagactgtgaacagtctcaggacagtaacagtgaccttagaaatgatgacagtgccaatgaccgcgtgccgtatggcatttctgccatcgaaagaaatgctagaatcatcaagtggttatatagcatcaaacaagctagagagtcacagaaggtctcccatgtgtaagacagtgcgtggaaaggagggagcgtgggtctctgtgcttacgcagttgtgaaggttgtgaggtctccttgaagtgttgtgagcttctccactctttgtgttgcttgttgtgcaatgttttcaagttgcatgcttgtcaacatggggactgacctggcttccacgtcaccatcgctacagagcctggctgaacacgcgtcatctgccaaaagtttcaggccagaatctaattagggctttgctcgtaagcaaaactgtttacatgaaaatggtatacaacttcttcgatatttatgtggttcttgtgtttttatatcccgcgctattgtgtcttaattaaaagttttatcaactggcttttaagttgagagcggaatctttttgaaataaaaagccactttgcctacatgtgagactattccagtgggacagtaaatgggatctgctaccaaacagataatgactgaccaaacatagaaccaggctgggttttctgtggaataaagtggtgagcctgacgttaatcgtttacatgttgaaattctcttgccacttagtgaagcagtcattggggtaacaatgctacgttttgtgtccgattcagtgtgtaaacgttggtggttctatgtaatactgaccccaaggaaagacgatcagatacaaagaaagatggttaaatctaggaggttgggtgtttgggggttttgttgatgttgttctgattgggataattcagaaattcctaatattatctttcgacagaatgaccaccctaaaacaaatactgaatgcctttaaaaaaaaaaaagttgtggttttttgtttttttttttttttttttttggtcgagaactactaatttcatgctatttctttctctctccctttgttgttatttgatttgggggaagggagtgaggcttgtgcagatttgagctatctgaagacatgaacagaagtcaaataccagccatatcagtagagccttccattcaaaagtgaacacacttggtagctgaaccatatctgagcagcgtgattctgttgtcttgcatatgttattctctcaggctgtggatctttgttacagctctaggaaactgtagaaatacaatgctatgtagcttttccaccccatggtctctagtgctgcctatcaacttgtccccttttttcccaataacctgtcttccaggtggtacagttagctgtcactcagctgacaccatgatgtggcagcagagagggaaacctacaagtggtttgcctcattgcctttgccacatctgaagttctcagcagcactaccttagacttcatgagctaataggaaactttttatggtgtaaatgctgtaagactttgtacatacttcagttgttatgaaatctttaaagaaaaaaagaaaaagttacgctaataaattgctgtggtgcaggcaaaaaaaaaaaaaaaaaaaaaaaaaa

SEQ ID NO: 269 - DNA, 464 bp, Artificial Sequence
  Description of Artificial sequences:primer
  misc_feature (1)..(464): 5' terminal sequence from clone image:166052. protein kinase, camp-dependent, catalytic, alpha(PRKACA) gene.
  misc_feature (77)..(78): n is a, c, g, or t
  misc_feature (263)..(263): n is a, c, g, or t
  misc_feature (441)..(441): n is a, c, g, or t
gattatcctgagcaaaggctacaacaaggccgtggactggtgggccctgggggttcttatctatgaaatggccgctnntacccgcccttcttcgcagaccagcccatccagatctatgagaagatcgtctctgggaaggtgcgcttcccttcccacttcagctctgacttgaaggacctgctgcggaacctcctgcaggtagatctcaccaagcgctttgggaacctcaagaatggggtcaacgatatcaagaaccacaagtngtttgccacaactgactggattgccatctaccagaggaaggtggaagctccctttcataccaaagtttaaaggccctggggatacgagttaactttgacgactatgaggaagaagaaatccgggttttccatcaatgagaagtttgggcaaggagttttctgagttttaggggtctgnctgttgccccatgggttttcttt

SEQ ID NO: 270 - DNA, 2685 bp, Artificial Sequence
  Description of Artificial sequences:primer
  misc_feature (1)..(2685): protein kinase, camp-dependent, catalytic, alpha(PRKACA) gene.
tcgggctgaggttcccgggcgggcgggcgcggagagacgcgggaagcaggggctgggcgggggtcgcggcgccgcagctagcgcagccagcccgagggccgccgccgccgccgcccagcgcgctccggggccgccggccgcagccagcacccgccgcgccgcagctccgggaccggccccggccgccgccgccgcgatgggcaacgccgccgccgccaagaagggcagcgagcaggagagcgtgaaagaattcttagccaaagccaaagaagattttcttaaaaaatgggaaagtcccgctcagaacacagcccacttggatcagtttgaacgaatcaagaccctcggcacgggctccttcgggcgggtgatgctggtgaaacacaaggagaccgggaaccactatgccatgaagatcctcgacaaacagaaggtggtgaaactgaaacagatcgaacacaccctgaatgaaaagcgcatcctgcaagctgtcaactttccgttcctcgtcaaactcgagttctccttcaaggacaactcaaacttatacatggtcatggagtacgtgcccggcggggagatgttctcacacctacggcggatcggaaggttcagtgagccccatgcccgtttctacgcggcccagatcgtcctgacctttgagtatctgcactcgctggatctcatctacagggacctgaagccggagaatctgctcattgaccagcagggctacattcaggtgacagacttcggtttcgccaagcgcgtgaagggccgcacttggaccttgtgcggcacccctgagtacctggcccctgagattatcctgagcaaaggctacaacaaggccgtggactggtgggccctgggggttcttatctatgaaatggccgctggctacccgcccttcttcgcagaccagcccatccagatctatgagaagatcgtctctgggaaggtgcgcttcccttcccacttcagctctgacttgaaggacctgctgcggaacctcctgcaggtagatctcaccaagcgctttgggaacctcaagaatggggtcaacgatatcaagaaccacaagtggtttgccacaactgactggattgccatctaccagaggaaggtggaagctcccttcataccaaagtttaaaggccctggggatacgagtaactttgacgactatgaggaagaagaaatccgggtctccatcaatgagaagtgtggcaaggagttttctgagttttaggggcatgcctgtgcccccatgggttttcttttttcttttttcttttttttggtcgggggggtgggagggttggattgaacagccagagggccccagagttccttgcatctaatttcacccccaccccaccctccagggttagggggagcaggaagcccagataatcagagggacagaaacaccagctgctccccctcatccccttcaccctcctgccccctctcccacttttcccttcctctttccccacagccccccagcccctcagccctcccagcccacttctgcctgttttaaacgagtttctcaactccagtcagaccaggtcttgctggtgtatccagggacagggtatggaaagaggggctcacgcttaactccagcccccacccacacccccatcccacccaaccacaggccccacttgctaagggcaaatgaacgaagcgccaaccttcctttcggagtaatcctgcctgggaaggagagatttttagtgacatgttcagtgggttgcttgctagaatttttttaaaaaaacaacaatttaaaatcttatttaagttccaccagtgcctccctccctccttcctctactcccacccctcccatgtccccccattcctcaaatccattttaaagagaagcagactgactttggaaagggaggcgctggggtttgaacctccccgctgctaatctcccctgggcccctccccggggaatcctctctgccaatcctgcgagggtctaggcccctttaggaagcctccgctctctttttccccaacagacctgtcttcacccttgggctttgaaagccagacaaagcagctgcccctctccctgccaaagaggagtcatcccccaaaaagacagagggggagccccaagcccaagtctttcctcccagcagcgtttccccccaactccttaattttattctccgctagattttaacgtccagccttccctcagctgagtggggagggcatccctgcaaaagggaacagaagaggccaagtccccccaagccacggcccggggttcaaggctagagctgctggggaggggctgcctgttttactcacccaccagcttccgcctcccccatcctgggcgcccctcctccagcttagctgtcagctgtccatcacctctcccccactttctcatttgtgcttttttctctcgtaatagaaaagtggggagccgctggggagccaccccattcatccccgtatttccccctctcataacttctccccatcccaggaggagttctcaggcctggggtggggccccgggtgggtgcgggggcgattcaacctgtgtgctgcgaaggacgagacttcctcttgaacagtgtgctgttgtaaacatatttgaaaactattaccaataaagttttgtttaaaaaaaaaaaaaaaaaa

SEQ ID NO: 271 - DNA, 471 bp, Artificial Sequence
  Description of Artificial sequences:primer
  misc_feature (1)..(471): 3' terminal sequence from clone image:1662274. serine (or cysteine) proteinase inhibitor, clade b (ovalbumin), member 5(SERPINB5) gene.
gtagttcaataatattttattggcaatagcataggagaaattcaatattgaatctcagaacaagaagaagctatttacaatgcatgtcaaggaagagatgggagaaggaatgtcacaaaattttttggtaaatacatattttttatagagaagtaatccatgaacctgcaacatggatagcttatccaaccaactttacaaattactattaatataagttacatgcttgccatctaaagtaactaaacccatagactgaaaaactatgtgtcaaggtaacgtgagcactttaatcactttacttatattttctaaaggcagtagtttcctctccttttcccgctatcatattagatgaagagacaagttccttcaacacaaattctgatatcggctattgtgagaatccctgtgcgagtcagctagaagcccctgccaccagtctagtgccaaccaaatgaccagatggga

SEQ ID NO: 272 - DNA, 2566 bp, Artificial Sequence
  Description of Artificial sequences:primer
  misc_feature (1)..(2566): serine (or cysteine) proteinase inhibitor, clade b (ovalbumin), member 5(SERPINB5) gene.
ggcacgagttgtgctcctcgcttgcctgttccttttccacgcattttccaggataactgtgactccaggcccgcaatggatgccctgcaactagcaaattcggcttttgccgttgatctgttcaaacaactatgtgaaaaggagccactgggcaatgtcctcttctctccaatctgtctctccacctctctgtcacttgctcaagtgggtgctaaaggtgacactgcaaatgaaattggacaggttcttcattttgaaaatgtcaaagatataccctttggatttcaaacagtaacatcggatgtaaacaaacttagttccttttactcactgaaactaatcaagcggctctacgtagacaaatctctgaatctttctacagagttcatcagctctacgaagagaccctatgcaaaggaattggaaactgttgacttcaaagataaattggaagaaacgaaaggtcagatcaacaactcaattaaggatctcacagatggccactttgagaacattttagctgacaacagtgtgaacgaccagaccaaaatccttgtggttaatgctgcctactttgttggcaagtggatgaagaaatttcctgaatcagaaacaaaagaatgtcctttcagactcaacaagacagacaccaaaccagtgcagatgatgaacatggaggccacgttctgtatgggaaacattgacagtatcaattgtaagatcatagagcttccttttcaaaataagcatctcagcatgttcatcctactacccaaggatgtggaggatgagtccacaggcttggagaagattgaaaaacaactcaactcagagtcactgtcacagtggactaatcccagcaccatggccaatgccaaggtcaaactctccattccaaaatttaaggtggaaaagatgattgatcccaaggcttgtctggaaaatctagggctgaaacatatcttcagtgaagacacatctgatttctctggaatgtcagagaccaagggagtggccctatcaaatgttatccacaaagtgtgcttagaaataactgaagatggtggggattccatagaggtgccaggagcacggatcctgcagcacaaggatgaattgaatgctgaccatccctttatttacatcatcaggcacaacaaaactcgaaacatcattttctttggcaaattctgttctccttaagtggcatagcccatgttaagtcctccctgacttttctgtggatgccgatttctgtaaactctgcatccagagattcattttctagatacaataaattgctaatgttgctggatcaggaagccgccagtacttgtcatatgtagccttcacacagatagacctttttttttttccaattctatcttttgtttccttttttcccataagacaatgacatacgcttttaatgaaaaggaatcacgttagaggaaaaatatttattcattatttgtcaaattgtccggggtagttggcagaaatacagtcttccacaaagaaaattcctataaggaagatttggaagctcttcttcccagcactatgctttccttctttgggatagagaatgttccagacattctcgcttccctgaaagactgaagaaagtgtagtgcatgggacccacgaaactgccctggctccagtgaaacttgggcacatgctcaggctactataggtccagaagtccttatgttaagccctggcaggcaggtgtttattaaaattctgaattttggggattttcaaaagataatattttacatacactgtatgttatagaacttcatggatcagatctggggcagcaacctataaatcaacaccttaatatgctgcaacaaaatgtagaatattcagacaaaatggatacataaagactaagtagcccataaggggtcaaaatttgctgccaaatgcgtatgccaccaacttacaaaaacacttcgttcgcagagcttttcagattgtggaatgttggataaggaattatagacctctagtagctgaaatgcaagaccccaagaggaagttcagatcttaatataaattcactttcatttttgatagctgtcccatctggtcatgtggttggcactagactggtggcaggggcttctagctgactcgcacagggattctcacaatagccgatatcagaatttgtgttgaaggaacttgtctcttcatctaatatgatagcgggaaaaggagaggaaactactgcctttagaaaatataagtaaagtgattaaagtgctcacgttaccttgacacatagtttttcagtctatgggtttagttactttagatggcaagcatgtaacttatattaatagtaatttgtaaagttgggtggataagctatccctgttgccggttcatggattacttctctataaaaaatatatatttaccaaaaaattttgtgacattccttctcccatctcttccttgacatgcattgtaaataggttcttcttgttctgagattcaatattgaatttctcctatgctattgacaataaaatattattgaactacc

SEQ ID NO: 273 - DNA, 607 bp, Artificial Sequence
  Description of Artificial sequences:primer
  misc_feature (1)..(607): 3' terminal sequence from clone image:1667886. heat shock transcription factor 4(HSF4) gene.
  misc_feature (183)..(183): n is a, c, g, or t
  misc_feature (460)..(461): n is a, c, g, or t
ggcgtaaggtgcccggctgggcgatcgacggccgtgggcccggagacctgggtcgactactgggcgaggcagaacgagatcttgtggcgggaggtggtgacacttcggcagagcacggtcagcagcaccgggtcattggcaagctgatccagtgtctctttgggccacttcaggcggggcgangcaatgcaggaggcaagagaaagctgtccctgatgctggatgaggggagctcatgcccaacacctgccaagttcaacacctgccctctacctggtgcccttctgcaggacccctacttcatccagtcggaagagaagatggaagccagccttccccccaaccagacccaggccctccagcatggactgagcctcctccctcaaaccttctcccttagacctggcccagcctctcccagagacaaatttgggccttaccctcacagcggcagggccanntcatctctgacatcccagagactctccatccctgaggaccaggctttctcctccagtgatgcgagagccccccgcactgctgtggtgtgtgcaggcatctgggagggagaggagctcagcctgagggccagggatgccacagctga

SEQ ID NO: 274 - DNA, 1555 bp, Artificial Sequence
  Description of Artificial sequences:primer
  misc_feature (1)..(1555): heat shock transcription factor 4(HSF4) gene.
ccggatggtgcaggaagcgccagctgcgctgcccacggagccaggccccagccccgtgcctgccttcctcggcaagctatgggcgctggtgggggacccaggcacagaccacctgatccgctggagcccgagcgggaccagtttcctcgtaagcgaccagagccgtttcgccaaggaagtgctgccccagtatttcaagcatagcaacatggcgagcttcgtgcgccaactcaacatgtacggttttcggaaggtggtgagcatcgagcagggcggcctgcttaggccggagcgcgaccacgtcgagttccagcacccgagcttcgtgcgcggccgcgagcagctactggagcgcgtgcggcgcaaggtgcccgcgctgcgcggcgacgacggccgctggcgcccggaggacctgggtcgactactgggcgaggtgcaggctttgcggggagtgcaggagagcaccgaggcgcggctgcgggagctcaggcagcagaacgagatcttgtggcgggaggtggtgacacttcggcagagccacggtcagcagcaccgggtcattggcaagctgatccagtgtctctttgggccacttcaggcggggccgagcaatgcaggaggcaagagaaagctgtccctgatgctggatgaggggagctcatgcccaacacctgccaagttcaacacctgccctctacctggtgcccttctgcaggacccctacttcatccagtcgccttctacttacagcctctcccagagacaaatttgggccttagccctcacagggccaggggccccatcatctctgacatcccagaagactctccatcccctgaggggaccaggctttctccctccagtgatggcaggagcccccccgccactgcctgtggctgtggtgcaggccatcctggaagggaaagggagcttcagccccgaggggcccaggaatgcccaacagcctgaaccaggggatcccagggagatacctgacagggggcctctgggcctggaaagcggggacaggagcccagagagtctgctgcctccgatgctgcttcagccccctcaagaaagtgtggaacctgcagggcctctagatgtgctgggccccagtctccaagggcgagaatggaccctgatggacttggacatggagctgtccttgatgcagcccttggttccagagcggggtgagcctgagctggcggtcaaggggttaaattctccaagcccagggaaggaccccacgctcggggccccactcctgctggatgtccaggcggccttgggaggcccagccctgggcctgcctggggctttaaccatttatagcactcctgagagccggactgcctcctacttgggcccggaagccagtccctccccctaagaccccgcgcctctgaaggggcttggaaccagtccgccgctgcacatccttcttggcttcctggccgcctacgggggtgagcgaagcccccactactaaatggcctctctccactaccccgactatccctgcacataaactccgtttttttttttcacc

SEQ ID NO: 275 - DNA, 390 bp, Artificial Sequence
  Description of Artificial sequences:primer
  misc_feature (1)..(390): 3' terminal sequence from clone image:1671188. docking protein 2, 56kda(DOK2) gene.
tttttttttttttttttttttttttttttctgaaaatgctttaatgccaccaaaaaatttgaaaggggcaggaagctgcccccatccccctgggtgcctgggcccaggctgtccctgaagtggccatcaacaggcaggaggtttgcatagccaagcagcccaagcaattgctgacatccttttgtcctttgccctaaatgccccaggttcctcctcagctggggaaagaaagaggaggaagtggaaaaagagtaggaggagggtggttctctccagggcacccttcctgctttgggatggggactcacccaccaggccctgggagaggcaatttatcagccccaacaaaaacaggccaggcctcgggctccaaaaggggcagaggaggtt

SEQ ID NO: 276 - DNA, 1239 bp, Artificial Sequence
  Description of Artificial sequences:primer
  misc_feature (1)..(1239): docking protein 2, 56kda(DOK2) gene.
atgggagacggggcagtgaaacaaggcttcttgtatcttcagcagcagcagacgtttggaaagaaatggcgccgcttcggcgcctcactgtatggagggtcggactgcgccttggcccggctggagctgcaggagggcccggaaaagcctcgtcggtgtgaggctgcccggaaggtcatccgcctcagtgactgcctgcgggtggccgaagccggcggagaggccagcagcccccgggacaccagtgccttcttcctggaaaccaaagaacgcctgtacctcctggcggcccctgcagcggaacgcggcgactgggtgcaggccatctgcctcctggccttccccgggcagaggaaggagctctcggggccagagggaaagcagagccggccctgcatggaggaaaatgaattgtacagcagcgcagtcacagtcggcccccacaaggaatttcctgtgaccatgagacctacagaagccagtgagaggtgccaccgccgggggtcctataccctccgggctggggagagttccctggagctgtggggtgggcccgagccagggacccagctgtacgactggccctacaggtttctgcggcgctttgggcgggacaaggtaaccttttcctttgaggcaggccgtcgctgcgtctctggagagggcaactttgagttcgaaacccggcaaggcaatgagatcttcttggccctggaagaggccatctctgcccagaagaatgctgcacccgctacaccccaaccgcagccagccacaatccccgcgtcgctgccccggcctgatagcccctactctcggccgcatgactcactgccgccgccttcacccaccacaccggtgcctgctccacggcctcggggccaggagggggagtatgccgtgcccttcgatgcggtggcccgttccttggggaagaacttcaggggcatcttggcagtccctcctcagctcctggccgaccctctgtacgacagcattgaggagaccctgccccctcgacctgaccacatatacgataagcccgagggagtggctgccctgtccctctatgacagcccgcaggagccccggggtgaggcatggaggaggcaggcgacacgtgacagggaccctgctggcctccagcatgtccagccagccgggcaggatttctctgcttctggctggcagccaggaactgagtatgacaatgttgtactaaagaaaggcccaaagtga

SEQ ID NO: 277 - DNA, 796 bp, Artificial Sequence
  Description of Artificial sequences:primer
  misc_feature (1)..(796): 3' terminal sequence from clone image:1683100. eukaryotic translation elongation factor 1 alpha 1(EEF1A1) gene.
  misc_feature (388)..(388): n is a, c, g, or t
  misc_feature (649)..(649): n is a, c, g, or t
ttttttctcatttaacttttttaatgggtctcaaaattctgtgacaaatttttggtcaagttgtttccattaaaaagtactgattttaaaaactaataacttaaaactgccacacgcaaaaaagaaaaccaaagtggtccacaaaacattctcctttccttctgaaggttttacgatgcattgttatcattaaccagtcttttactactaaacttaaatggccaattgaaacaaacagttctgagaccgttcttccaccactgattaagagtggggtggcaggtattagggataatattcatttagccttctgagctttctgggcagacttggtgaccttgccagctccagcagccttcttgtccactgctttgatgacacccaccgnaactgtctgtctcatatcacgaacagcaaagcgacccaaaggtggatagtctgagaagctctcaacacacatgggcttgccaggaaccatatcaacaatggcagcatcaccagacttcaagaatttagggccatcttccagctttttaccagaacggcgatcaatcttttccttcagctcagcaaacttgcatgcaatgtgagccgtgtggcaatccaatacaggggcatagccggcgcttatttggcctggatggttcangataatcacctgagcagtgaagccagctgcttccattggtggtcatttttgctgtcacccagcacgttgccacgacgaacatcctttgcagacacatttctgacattgaaaccccaattgtccccaggaagaactttactcaaagct

SEQ ID NO: 278 - DNA, 1837 bp, Artificial Sequence
  Description of Artificial sequences:primer
  misc_feature (1)..(1837): eukaryotic translation elongation factor 1 alpha 1(EEF1A1) gene.
tttttcgcaacgggtttgccgccagaacacaggtgtcgtgaaaactacccctaaaagccaaaatgggaaaggaaaagactcatatcaacattgtcgtcattggacacgtagattcgggcaagtccaccactactggccatctgatctataaatgcggtggcatcgacaaaagaaccattgaaaaatttgagaaggaggctgctgagatgggaaagggctccttcaagtatgcctgggtcttggataaactgaaagctgagcgtgaacgtggtatcaccattgatatctccttgtggaaatttgagaccagcaagtactatgtgactatcattgatgccccaggacacagagactttatcaaaaacatgattacagggacatctcaggctgactgtgctgtcctgattgttgctgctggtgttggtgaatttgaagctggtatctccaagaatgggcagacccgagagcatgcccttctggcttacacactgggtgtgaaacaactaattgtcggtgttaacaaaatggattccactgagccaccctacagccagaagagatatgaggaaattgttaaggaagtcagcacttacattaagaaaattggctacaaccccgacacagtagcatttgtgccaatttctggttggaatggtgacaacatgctggagccaagtgctaacatgccttggttcaagggatggaaagtcacccgtaaggatggcaatgccagtggaaccacgctgcttgaggctctggactgcatcctaccaccaactcgtccaactgacaagcccttgcgcctgcctctccaggatgtctacaaaattggtggtattggtactgttcctgttggccgagtggagactggtgttctcaaacccggtatggtggtcacctttgctccagtcaacgttacaacggaagtaaaatctgtcgaaatgcaccatgaagctttgagtgaagctcttcctggggacaatgtgggcttcaatgtcaagaatgtgtctgtcaaggatgttcgtcgtggcaacgttgctggtgacagcaaaaatgacccaccaatggaagcagctggcttcactgctcaggtgattatcctgaaccatccaggccaaataagcgccggctatgcccctgtattggattgccacacggctcacattgcatgcaagtttgctgagctgaaggaaaagattgatcgccgttctggtaaaaagctggaagatggccctaaattcttgaagtctggtgatgctgccattgttgatatggttcctggcaagcccatgtgtgttgagagcttctcagactatccacctttgggtcgctttgctgttcgtgatatgagacagacagttgcggtgggtgtcatcaaagcagtggacaagaaggctgctggagctggcaaggtcaccaagtctgcccagaaagctcagaaggctaaatgaatattatccctaatacctgccaccccactcttaatcagtggtggaagaacggtctcagaactgtttgtttcaattggccatttaagtttagtagtaaaagactggttaatgataacaatgcatcgtaaaaccttcagaaggaaaggagaatgttttgtggaccactttggttttcttttttgcgtgtggcagttttaagttattagtttttaaaatcagtactttttaatggaaacaacttgaccaaaaatttgtcacagaattttgagacccattaaaaaagttaaatgagaaaaaaaaaaaaaaaaaaaaaaaaaaaaaaaaaaaaaaaaaaaaaaaaaaaaaaaaaaaaaaaaaaaaaaaaaaaaaaaaaaaaaaaaaaaaaa

SEQ ID NO: 279 - DNA, 453 bp, Artificial Sequence
  Description of Artificial sequences:primer
  misc_feature (1)..(453): 3' terminal sequence from clone image:1705397. s100 calcium binding protein a12 (calgranulin c)(S100A12) gene.
tttttttttgaacttttcgtgagtgtgtttattaactcttactccccacgggcaaggctgggttttggtgagggaaagaaaagaccctcgttgaggacattgctgggtaaaaagccttcagagagctacctactctttgtgggtgtggtaatgggcagccttcagcgcaatggctaccagggatatgaattcttgaaagtcgacctgttcatcttgattagcatccaggccttggaatatttcatcaatgacagctttatctttgatattcttgatggtgtttgcaagctcctttgtaagcagctgcttcagctcacccttagagagggtgtcaaaatgccccttccgaactgagtattggtggaagatattgacaattccctccagatgctcttcaagttttgtcatcttcccagcctaatgttaacccctcaatgcacaggaatgtggcct

SEQ ID NO: 280 - DNA, 466 bp, Artificial Sequence
  Description of Artificial sequences:primer
  misc_feature (1)..(466): s100 calcium binding protein a12 (calgranulin c)(S100A12) gene.
accactgctggctttttgctgtagctccacattcctgtgcattgaggggttaacattaggctgggaagatgacaaaacttgaagagcatctggagggaattgtcaatatcttccaccaatactcagttcggaaggggcattttgacaccctctctaagggtgagctgaagcagctgcttacaaaggagcttgcaaacaccatcaagaatatcaaagataaagctgtcattgatgaaatattccaaggcctggatgctaatcaagatgaacaggtcgactttcaagaattcatatccctggtagccattgcgctgaaggctgcccattaccacacccacaaagagtaggtagctctctgaaggctttttacccagcaatgtcctcaatgagggtcttttctttccctcaccaaaacccagccttgcccgtggggagtaagagttaataaacacactcacgaaaagtt

SEQ ID NO: 281 - DNA, 440 bp, Artificial Sequence
  Description of Artificial sequences:primer
  misc_feature (1)..(440): 3' terminal sequence from clone image:172444. calcium/calmodulin-dependent protein kinase (cam kinase) ii beta(CAMK2B) gene.
  misc_feature (402)..(402): n is a, c, g, or t
  misc_feature (428)..(428): n is a, c, g, or t
ggggtcatgcaaaagaattatcccccagaaaaaaaatccccaaattatcccagacaggcagctccgtggaggtgacaaggtgagagggagaggaggggaggaggccccaggacgccagggtggccggctgctgggccacgtgctgtccgtggtgagccctgccgctgtcccatggcccagggagccactggtgcggacccggcagatgtttaccctgtgttcatggatggggacagctgtcctgggcacagcgtggaacggaagatggtgtccactctgagtgttcatcggtggacagtccccttggagtttaggatcctgtgtcctgttccccattctgtgcccctcccttggcttgatttgtaggggaagattaaagaaaatccttgtttgaaaacaatnttgaatttgaaagtgggcaggcattngggcaggagcct

SEQ ID NO: 282 - DNA, 421 bp, Artificial Sequence
  Description of Artificial sequences:primer
  misc_feature (1)..(421): 5' terminal sequence from clone image:172444. calcium/calmodulin-dependent protein kinase (cam kinase) ii beta(CAMK2B) gene.
  misc_feature (20)..(20): n is a, c, g, or t
  misc_feature (269)..(269): n is a, c, g, or t
  misc_feature (414)..(414): n is a, c, g, or t
gtggctgcccagcttctggnttgaagacaagggtctgtgcaggggtttactgaagtgggagtgcctttggaatctgggccgggagcagaagggagcaaaagctacagtgggagccagcctagggcacatgggaggcgtgagggcagtgctgcccttgcagtgtcaggtgtgccagtgccttggcgggctgcagtgcgtgtgagggcaccttctaggtgggccagggatgcagctatggagataaggcgggctggggacagaaacaggtnggcacagggcccagggacaccagcggatggagggcagggtctagccctgttgcttcctgagcgtcggctgcctggggttcgaggcggtgggtccccggcccctttgtggatggtgttttaccattggggggagcttcggggacanggcaagt

SEQ ID NO: 283 - DNA, 2438 bp, Artificial Sequence
  Description of Artificial sequences:primer
  misc_feature (1)..(2438): calcium/calmodulin-dependent protein kinase (cam kinase) ii beta(CAMK2B) gene.
gcggcgcgctcctggcgaggacggagcgagcagatctcgcgtgcgctcgccgcccggcgcagcccagcccggcccccgcctggcgccgcgagccgaggtgtctcccgcgcccgcgcccgtgtcgccgccgtgcccgcgagcgggagccggagtcgccgccgcccgagcgcagccgagcgcacgccgagcccgtccgccgccgccatggccaccacggtgacctgcacccgcttcaccgacgagtaccagctctacgaggatattggcaagggggctttctctgtggtccgacgctgtgtcaagctctgcaccggccatgagtatgcagccaagatcatcaacaccaagaagctgtcagccagagatcaccagaagctggagagagaggctcggatctgccgccttctgaagcattccaacatcgtgcgtctccacgacagcatctccgaggagggcttccactacctggtcttcgatctggtcactggtggggagctctttgaagacattgtggcgagagagtactacagcgaggctgatgccagtcactgtatccagcagatcctggaggccgttctccattgtcaccaaatgggggtcgtccacagagacctcaagccggagaacctgcttctggccagcaagtgcaaaggggctgcagtgaagctggcagacttcggcctagctatcgaggtgcagggggaccagcaggcatggtttggtttcgctggcacaccaggctacctgtcccctgaggtccttcgcaaagaggcgtatggcaagcctgtggacatctgggcatgtggggtgatcctgtacatcctgctcgtgggctacccacccttctgggacgaggaccagcacaagctgtaccagcagatcaaggctggtgcctatgacttcccgtcccctgagtgggacaccgtcactcctgaagccaaaaacctcatcaaccagatgctgaccatcaaccctgccaagcgcatcacagcccatgaggccctgaagcacccgtgggtctgccaacgctccacggtagcatccatgatgcacagacaggagactgtggagtgtctgaaaaagttcaatgccaggagaaagctcaagggagccatcctcaccaccatgctggccacacggaatttctcagtgggcagacagaccaccgctccggccacaatgtccaccgcggcctccggcaccaccatggggctggtggaacaagccaagagtttactcaacaagaaagcagatggagtcaagccccagacgaatagcaccaaaaacagtgcagccgccaccagccccaaagggacgcttcctcctgccgccctggagcctcaaaccaccgtcatccataacccagtggacgggattaaggagtcttctgacagtgccaataccaccatagaggatgaagacgctaaagcccccagggtccccgacatcctgagctcagtgaggaggggctcgggagccccagaagccgaggggcccctgccctgcccatctccggctccctttagccccctgccagccccatcccccaggatctctgacatcctgaactctgtgagaaggggttcaggaaccccagaagccgagggccccctctcagcggggcccccgccctgcctgtctccggctctcctaggccccctgtcctccccgtcccccaggatctctgacatcctgaactctgtgaggaggggctcagggaccccagaagccgagggcccctcgccagtggggcccccgccctgcccatctccgactatccctggccccctgcccaccccatcccggaagcaggagatcattaagaccacggagcagctcatcgaggccgtcaacaacggtgactttgaggcctacgcgaaaatctgtgacccagggctgacctcgtttgagcctgaagcactgggcaacctggttgaagggatggacttccacagattctacttcgagaacctgctggccaagaacagcaagccgatccacacgaccatcctgaacccacacgtgcacgtcattggagaggatgccgcctgcatcgcttacatccggctcacgcagtacattgacgggcagggccggccccgcaccagccagtctgaggagacccgcgtgtggcaccgccgcgacggcaagtggcagaacgtgcacttccactgctcgggcgcgcctgtggccccgctgcagtgaagagctgcgccctggtttcgccggacagagttggtgtttggagcccgactgccctcgggcacacggcctgcctgtcgcatgtttgtgtctgcctcgttccctcccctggtgcctgtgtctgcagaaaaacaagaccagatgtgatttgttaaaaaaaaacaaaaaaaaaaaaaaaaaaaacaagatgacgacgacaaccacaaaaaaaattgacatcagatgaaatgaaaaaa

SEQ ID NO: 284 - DNA, 632 bp, Artificial Sequence
  Description of Artificial sequences:primer
  misc_feature (1)..(632): 3' terminal sequence from clone image:1731982. phospholipase c, gamma 2 (phosphatidylinositol-specific)(PLCG2) gene.
  misc_feature (367)..(367): n is a, c, g, or t
  misc_feature (424)..(424): n is a, c, g, or t
  misc_feature (486)..(486): n is a, c, g, or t
  misc_feature (573)..(573): n is a, c, g, or t
  misc_feature (585)..(585): n is a, c, g, or t
  misc_feature (601)..(604): n is a, c, g, or t
caaggttttcattgcttttattcaatgaggtttggaacatgagaggccaaaaatgaggagcacattttggggaatcctctataaagaatataagttaagaaagttgtccaagatgaaaataataggaaattaccccaactcatgccagttgggtcttaagaaatgtccttgatggcaggcttgaagaaaagatgtcacagattagcgtcttcccagagtgtgaatagggcacgttctcctacatgcaaacacacatgcgcacacacacaatacccttacacacataccccagctttaatgagtaaaacttgctgttgctgactctcttctctcttacttctgttgcatttctcctgtacagtggagnctggttctcataacactgaacttttaacaggcttccccgttgattgccaagtttggnggggggtgcatacaagagctgggtgtttcagtcctcttgcgcctctattggcaggaagaganaaggttcttttcgtttcaggatggccgattaacgaacaggaggagcagctttagtcctgttgacatcttcaaggacgctgatcctantgatgttggggngggagggctgcacagnnnngggatcgtgactatttctcatacccaag

SEQ ID NO: 285 - DNA, 4242 bp, Artificial Sequence
  Description of Artificial sequences:primer
  misc_feature (1)..(4242): phospholipase c, gamma 2 (phosphatidylinositol-specific)(PLCG2) gene.
gaattcggcgctgagtgacccgagtcgggacgcgggctgcgcgcgcgggaccccggagcccaaacccggggcaggcgggcagctgtgcccgggcggcacggccagcttcctgatttctcccgattccttccttctccctggagcggccgacaatgtccaccacggtcaatgtagattcccttgcggaatatgagaagagccagatcaagagagccctggagctggggacggtgatgactgtgttcagcttccgcaagtccacccccgagcggagaaccgtccaggtgatcatggagacgcggcaggtggcctggagcaagaccgccgacaagatcgagggcttcttggatatcatggaaataaaagaaatccgcccagggaagaactccaaagatttcgagcgagcaaaagcagttcgccagaaagaagactgctgcttcaccatcctatatggcactcagttcgtcctcagcacgctcagcttggcagctgactctaaagaggatgcagttaactggctctctggcttgaaaatcttacaccaggaagcgatgaatgcgtccacgcccaccattatcgagagttggctgagaaagcagatatattctgtggatcaaaccagaagaaacagcatcagtctccgagagttgaagaccatcttgcccctgatcaactttaaagtgagcagtgccaagttccttaaagataagtttgtggaaataggagcacacaaagatgagctcagctttgaacagttccatctcttctataaaaaacttatgtttgaacagcaaaaatcgattctcgatgaattcaaaaaggattcgtccgtgttcatcctggggaacactgacaggccggatgcctctgctgtttacctgcatgacttccagaggtttctcatacatgaacagcaggagcattgggctcaggatctgaacaaagtccgtgagcggatgacaaagttcattgatgacaccatgcgtgaaactgctgagcctttcttgtttgtggatgagttcctcacgtacctgttttcacgagaaaacagcatctgggatgagaagtatgacgcggtggacatgcaggacatgaacaaccccctgtctcattactggatctcctcgtcacataacacgtaccttacaggtgaccagctgcggagcgagtcgtccccagaagcttacatccgctgcctgcgcatgggctgtcgctgcattgaactggactgctgggacgggcccgatgggaagccggtcatctaccatggctggacgcggactaccaagatcaagtttgatgacgtcgtgcaggccatcaaagaccacgcctttgttacctcgagcttcccagtgatcctgtccatcgaggagcactgcagcgtggagcaacagcgtcacatggccaaggccttcaaggaagtatttggcgacctgctgttgacgaagcccacggaggccagtgctgaccagctgccctcgcccagccagctgcgggagaagatcatcatcaagcataagaagctgggcccccgaggcgatgtggatgtcaacatggaggacaagaaggacgaacacaagcaacagggggagctgtacatgtgggattccattgaccagaaatggactcggcactactgcgccattgctgatgccaagctgtccttcagtgatgacattgaacagactatggaggaggaagtgccccaggatataccccctacagaactacattttggggagaaatggttccacaagaaggtggagaagaggacgagtgccgagaagttgctgcaggaatactgcatggagacggggggcaaggatggcaccttcctggttcgggagagcgagaccttccccaatgactacaccctgtccttctggcggtcaggccgggtccagcactgccggatccgctccaccatggagggcgggaccctgaaatactacttgactgacaacctgaggttcaggaggatgtatgccctcatccagcactaccgcgagacgcacctgccgtgcgccgagttcgagctgcggctcacggaccctgtgcccaaccccaacccccacgagtccaagccgtggtactatgacagcctgagccgcggagaggcagaggacatgctgatgaggattccccgggacggggccttcctgatccggaagcgagaggggagcgactcctatgccatcaccttcagggctaggggcaaggtaaagcattgtcgcatcaaccgggacggccggcactttgtgctggggacctccgcctattttgagagtctggtggagctcgtcagttactacgagaagcattcactctaccgaaagatgagactgcgctaccccgtgacccccgagctcctggagcgctacaatacggaaagagatataaactccctctacgacgtcagcagaatgtatgtggatcccagtgaaatcaatccgtccatgcctcagagaaccgtgaaagctctgtatgactacaaagccaagcgaagcgatgagctgagcttctgccgtggtgccctcatccacaatgtctccaaggagcccgggggctggtggaaaggagactatggaaccaggatccagcagtacttcccatccaactacgtcgaggacatctcaactgcagacttcgaggagctagaaaagcagattattgaagacaatcccttagggtctctttgcagaggaatattggacctcaatacctataacgtcgtgaaagcccctcagggaaaaaaccagaagtcctttgtcttcatcctggagcccaaggagcagggcgatcctccggtggagtttgccacagacagggtggaggagctctttgagtggtttcagagcatccgagagatcacgtggaagattgacagcaaggagaacaacatgaagtactgggagaagaaccagtccatcgccatcgagctctctgacctggttgtctactgcaaaccaaccagcaaaaccaaggacaacttagaaaatcctgacttccgagaaatccgctcctttgtggagacgaaggctgacagcatcatcagacagaagcccgtcgacctcctgaagtacaatcaaaagggcctgacccgcgtctacccaaagggacaaagagttgactcttcaaactacgaccccttccgcctctggctgtgcggttctcagatggtggcactcaatttccagacggcagataagtacatgcagatgaatcacgcattgttttctctcaacgggcgcacgggctacgttctgcagcctgagagcatgaggacagagaaatatgacccgatgccacccgagtcccagaggaagatcctgatgacgctgacagtcaaggttctcggtgctcgccatctccccaaacttggacgaagtattgcctgtccctttgtagaagtggagatctgtggagccgagtatggcaacaacaagttcaagacgacggttgtgaatgataatggcctcagccctatctgggctccaacacaggagaaggtgacatttgaaatttatgacccaaacctggcatttctgcgctttgtggtttatgaagaagatatgttcagcgatcccaactttcttgctcatgccacttaccccattaaagcagtcaaatcaggattcaggtccgttcctctgaagaatgggtacagcgaggacatagagctggcttccctcctggttttctgtgagatgcggccagtcctggagagcgaagaggaactttactcctcctgtcgccagctgaggaggcggcaagaagaactgaacaaccagctctttctgtatgacacacaccagaacttgcgcaatgccaaccgggatgccctggttaaagagttcagtgttaatgagaaccactccagctgtaccaggagaaatgcaacaagaggttaagagagaagagagtcagcaacagcaagttttactcatagaagctggggtatgtgtgtaagggtattgtgtgtgtgcgcatgtgtgtttgcatgtaggagaacgtgccctattcacactctgggaagacgctaatctgtgacatcttttcttcaagcctgccatcaaggacatttcttaagacccaactggcatgagttggggtaatttcctattattttcatcttggacaacttctaacttatatctttatagaggattccccaaaatgtgctcctcatttttggcctctcatgttccaaacctcattgaataaaaagcaatgaaaaccttg

SEQ ID NO: 286 - DNA, 217 bp, Artificial Sequence
  Description of Artificial sequences:primer
  misc_feature (1)..(217): 3' terminal sequence from clone image:174388. non-metastatic cells 1, protein (nm23a) expressed in(NME1) gene.
  misc_feature (42)..(42): n is a, c, g, or t
  misc_feature (80)..(80): n is a, c, g, or t
  misc_feature (83)..(84): n is a, c, g, or t
  misc_feature (110)..(110): n is a, c, g, or t
  misc_feature (113)..(113): n is a, c, g, or t
  misc_feature (116)..(116): n is a, c, g, or t
  misc_feature (138)..(138): n is a, c, g, or t
  misc_feature (146)..(146): n is a, c, g, or t
  misc_feature (151)..(151): n is a, c, g, or t
  misc_feature (158)..(158): n is a, c, g, or t
  misc_feature (169)..(169): n is a, c, g, or t
  misc_feature (174)..(174): n is a, c, g, or t
  misc_feature (193)..(193): n is a, c, g, or t
  misc_feature (197)..(197): n is a, c, g, or t
  misc_feature (204)..(204): n is a, c, g, or t
  misc_feature (209)..(209): n is a, c, g, or t
ggaggaagttttttaatcagatggtcggggatggtaacactntacagggagaactcacagctccaagagtttccctccanatnntgatgatgttcctgtaaataactagnttnccnacagcctgggcctctgcccatnggatgganggganatggatntgaaaagcaangtggnctgcccacctgtcattcanaganccagtantgagnacagctcg

SEQ ID NO: 287 - DNA, 332 bp, Artificial Sequence
  Description of Artificial sequences:primer
  misc_feature (1)..(332): 5' terminal sequence from clone image:174388. non-metastatic cells 1, protein (nm23a) expressed in(NME1) gene.
  misc_feature (123)..(123): n is a, c, g, or t
  misc_feature (132)..(132): n is a, c, g, or t
  misc_feature (191)..(191): n is a, c, g, or t
  misc_feature (211)..(211): n is a, c, g, or t
  misc_feature (240)..(240): n is a, c, g, or t
  misc_feature (259)..(259): n is a, c, g, or t
  misc_feature (266)..(266): n is a, c, g, or t
  misc_feature (289)..(289): n is a, c, g, or t
tcaaacctaagcagctggaaggaaccatggccaactgtgagcgtaccttcattgcgatcaaaccagatggggtccagcggggtcttgtgggagagattatcaagcgttttgagcagaaaggantccgccttnttggtctgaaattcatgcaagcttccgaagatcttctcaaggaacactacgttgacctnaaggaccgtccattctttgncggcctggtgaaatacatgcactcagggncggtagttgccatggtctnggagggnctgaatgtggtgaagacgggccnagtcatgctcggggagaccaaccctgcagactccaagcctggg

SEQ ID NO: 288 - DNA, 732 bp, Artificial Sequence
  Description of Artificial sequences:primer
  misc_feature (1)..(732): non-metastatic cells 1, protein (nm23a) expressed in(NME1) gene.
tgctgcgaaccacgtgggtcccgggcgcgtttcgggtgctggcggctgcagccggagttcaaacctaagcagctggaaggaaccatggccaactgtgagcgtaccttcattgcgatcaaaccagatggggtccagcggggtcttgtgggagagattatcaagcgttttgagcagaaaggattccgccttgttggtctgaaattcatgcaagcttccgaagatcttctcaaggaacactacgttgacctgaaggaccgtccattctttgccggcctggtgaaatacatgcactcagggccggtagttgccatggtctgggaggggctgaatgtggtgaagacgggccgagtcatgctcggggagaccaaccctgcagactccaagcctgggaccatccgtggagacttctgcatacaagttggcaggaacattatacatggcagtgattctgtggagagtgcagagaaggagatcggcttgtggtttcaccctgaggaactggtagattacacgagctgtgctcagaactggatctatgaatgacaggagggcagaccacattgcttttcacatccatttcccctccttcccatgggcagaggaccaggctgtaggaaatctagttatttacaggaacttcatcataatttggagggaagctcttggagctgtgagttctccctgtacagtgttaccatccccgaccatctgattaaaatgcttcctcccagc

SEQ ID NO: 289 - DNA, 422 bp, Artificial Sequence
  Description of Artificial sequences:primer
  misc_feature (1)..(422): 3' terminal sequence from clone image:178305. prostaglandin d2 synthase 21kda (brain)(PTGDS) gene.
  misc_feature (317)..(317): n is a, c, g, or t
  misc_feature (349)..(349): n is a, c, g, or t
  misc_feature (363)..(363): n is a, c, g, or t
  misc_feature (381)..(381): n is a, c, g, or t
  misc_feature (418)..(418): n is a, c, g, or t
tattgtgcaggatgaagcccgagtgggaggggtgctttggcggggagcggggcaggggctcggggaaggaacagagcagagacatccagagcgtgggggtcacctggctggccgggatcccagcttcagccctggggagtcctattgttccgtcatgcacttatcggtttggggcaggaagacaatggtatcctctgtgaagccctgggccttgcagaaggcggtgaatttctcctttaactcagccctgggggtctgggttcggctgtagagggtggccatgcggaagtcctcgccagggcccttgctgccctggntgtacagcagcgctaactggtcgtagtcggtntccaccactgacanggataggtgctgccccanttttcccaccccatggattttccgcggcagggggttngcca

SEQ ID NO: 290 - DNA, 429 bp, Artificial Sequence
  Description of Artificial sequences:primer
  misc_feature (1)..(429): 5' terminal sequence from clone image:178305. prostaglandin d2 synthase 21kda (brain)(PTGDS) gene.
  misc_feature (105)..(105): n is a, c, g, or t
  misc_feature (342)..(342): n is a, c, g, or t
  misc_feature (395)..(395): n is a, c, g, or t
  misc_feature (401)..(401): n is a, c, g, or t
  misc_feature (409)..(409): n is a, c, g, or t
  misc_feature (416)..(416): n is a, c, g, or t
  misc_feature (427)..(427): n is a, c, g, or t
ggccctgctgggggtgctgggcgacctgcaggcagcaccggagcccaggtctccgtgcagcccaacttccagcaggacaagttcctggggcgctggttcagcggngcctcgcctccaactcgagctggctccgggagaagaaggcggcgttgtccatgtgcaagtctgtggtggcccctgccacgggatggtggcctcaacctgacctccaccttcctcaggaaaaaccagtgtgagacccgaaccatgctgctgcagcccgcggggtccctcggctcctacagctaccggagtccccgtgagtggggcctccaccggccccctgggccaagcctggggggngaacaatttgccgggaagattttggggccagccccctgccgcggagattcatnggggtnggagattnggggcancaattatttcntt

SEQ ID NO: 291 - DNA, 775 bp, Artificial Sequence
  Description of Artificial sequences:primer
  misc_feature (1)..(775): prostaglandin d2 synthase 21kda (brain)(PTGDS) gene.
tgcaggagaatggctactcatcacacgctgtggatgggactggccctgctgggggtgctgggcgacctgcaggcagcaccggaggcccaggtctccgtgcagcccaacttccagcaggacaagttcctggggcgctggttcagcgcgggcctcgcctccaactcgagctggctccgggagaagaaggcggcgttgtccatgtgcaagtctgtggtggcccctgccacggatggtggcctcaacctgacctccaccttcctcaggaaaaaccagtgtgagacccgaaccatgctgctgcagcccgcggggtccctcggctcctacagctaccggagtccccactggggcagcacctactccgtgtcagtggtggagaccgactacgaccagtacgcgctgctgtacagccagggcagcaagggccctggcgaggacttccgcatggccaccctctacagccgaacccagacccccagggctgagttaaaggagaaattcaccgccttctgcaaggcccagggcttcacagaggataccattgtcttcctgccccaaaccgataagtgcatgacggaacaataggactccccagggctgaagctgggatcccggccagccaggtgacccccacgctctggatgtctctgctctgttccttccccgagcccctgccccggctccccgccaaagcacccctgcccactcgggcttcatcctgcacaataaactccggaagcaagtcagttaaaaaaaaaaaaaaaaaaaaaaaaaaaaa

SEQ ID NO: 292 - DNA, 520 bp, Artificial Sequence
  Description of Artificial sequences:primer
  misc_feature (1)..(520): 3' terminal sequence from clone image:179232. pyrophosphatase (inorganic)(PP) gene.
  misc_feature (2)..(2): n is a, c, g, or t
  misc_feature (445)..(445): n is a, c, g, or t
  misc_feature (485)..(485): n is a, c, g, or t
  misc_feature (503)..(503): n is a, c, g, or t
  misc_feature (511)..(511): n is a, c, g, or t
anctatgagcggcttcagcaccgaggagcgcgccgccctgtctccctggagtaccgagtcttcctcaaaaatgagaaaggacaatatatatctccatttcatgatattccaatttatgcagataaggatgtgtttcacatggtagttgaagtaccacgctggtctaatgcaaaaatggagattgctacaaaggaccctttaaaccctattaaacaagatgtgaaaaaaggaaaacttcgctatgttgcgaatttgttcccgtataaaggatatatctggaactatggtgccatccctcagacttggggaagacccaggggcacaatgataaacatactgggctgttgtgggtgacaatgacccaattgatgtgtgtgaaattgggaaggcaaggtatgtgcaagaggtgaataattgggcgtgaaagttctagggcatattggcnatgattgacgagggggaaccgactgggaaaggcattgccnttaatgtggggtgatccngatgcagnccattataa

SEQ ID NO: 293 - DNA, 1297 bp, Artificial Sequence
  Description of Artificial sequences:primer
  misc_feature (1)..(1297): pyrophosphatase (inorganic)(PP) gene.
gcgcaggcgtggggctctctccttgtcagtcggcgccgcgtgcgggctggtggctctgtggcagcggcggcggcaggactccggcactatgagcggcttcagcaccgaggagcgcgccgcgcccttctccctggagtaccgagtcttcctcaaaaatgagaaaggacaatatatatctccatttcatgatattccaatttatgcagataaggatgtgtttcacatggtagttgaagtaccacgctggtctaatgcaaaaatggagattgctacaaaggaccctttaaaccctattaaacaagatgtgaaaaaaggaaaacttcgctatgttgcgaatttgttcccgtataaaggatatatctggaactatggtgccatccctcagacttgggaagacccagggcacaatgataaacatactggctgttgtggtgacaatgacccaattgatgtgtgtgaaattggaagcaaggtatgtgcaagaggtgaaataattggcgtgaaagttctaggcatattggctatgattgacgaaggggaaaccgactggaaagtcattgccattaatgtggatgatcctgatgcagccaattataatgatatcaatgatgtcaaacggctgaaacctggctacttagaagctactgtggactggtttagaaggtataaggttcctgatggaaaaccagaaaatgagtttgcgtttaatgcagaatttaaagataaggactttgccattgatattattaaaagcactcatgaccattggaaagcattagtgactaagaaaacgaatggaaaaggaatcagttgcatgaatacaactttgtctgagagccccttcaagtgtgatcctgatgctgccagagccattgtggatgctttaccaccaccctgtgaatctgcctgcacagtaccaacagacgtggataagtggttccatcaccagaaaaactaatgagatttctctggaatacaagctgatattgctacatcgtgttcatctggatgtattagaagtaaaagtagtagcttttcaaagctttaaatttgtagaactcatctaactaaagtaaattctgctgtgactaatccaatatactcagaatgttatccatctaaagcatttttcatatctcaactaagataacttttagcacatgcttaaatatcaaagcagttgtcatttggaagtcacttgtgaatagatgtgcaaggggagcacatattggatgtatatgttaccatatgttaggaaataaaattattttgctgaaacttggaaaaaaaaaaaaaa

SEQ ID NO: 294 - DNA, 441 bp, Artificial Sequence
  Description of Artificial sequences:primer
  misc_feature (1)..(441): 3' terminal sequence from clone image:179264. protein phosphatase 2 (formerly 2a), regulatory subunit b (pr 52), gamma isoform(PPP2R2C) gene.
  misc_feature (11)..(11): n is a, c, g, or t
  misc_feature (29)..(29): n is a, c, g, or t
  misc_feature (37)..(37): n is a, c, g, or t
  misc_feature (342)..(342): n is a, c, g, or t
tgtggcggtanatgtatcctttccttttnattttttnaaacagacaattactgccaaacacaattctggcctaggaaagctggggcagggagggggcccaaacttcctgtgtccacacactgccacctctgcagctgtcctcatcagtgctgtgactttcttcccctccttgcattgcggtcgtgaaggtcatgtcggggatgacttgcatgaggctgggtggcaggggccgggaactgcacatacctagtgcatgtcagagtttaccttgtcctgggaagatgtacaggttgttggtggcggcgatggcaatgatgttctcagccgggtgccagggccgtntgcaggatcttcttgggtgaagtccaagctgtccacactgatgtcatcacgccggcgcttgccccccacggacacgggccgtggctttgagcacagccc

SEQ ID NO: 295 - DNA, 425 bp, Artificial Sequence
  Description of Artificial sequences:primer
  misc_feature (1)..(425): 3' terminal sequence from clone image:179776.
  misc_feature (12)..(14): n is a, c, g, or t
  misc_feature (18)..(18): n is a, c, g, or t
  misc_feature (49)..(49): n is a, c, g, or t
  misc_feature (166)..(166): n is a, c, g, or t
  misc_feature (178)..(178): n is a, c, g, or t
  misc_feature (229)..(229): n is a, c, g, or t
  misc_feature (241)..(241): n is a, c, g, or t
  misc_feature (252)..(252): n is a, c, g, or t
  misc_feature (259)..(259): n is a, c, g, or t
  misc_feature (264)..(264): n is a, c, g, or t
  misc_feature (273)..(273): n is a, c, g, or t
  misc_feature (291)..(291): n is a, c, g, or t
  misc_feature (305)..(305): n is a, c, g, or t
  misc_feature (331)..(331): n is a, c, g, or t
  misc_feature (356)..(356): n is a, c, g, or t
  misc_feature (363)..(363): n is a, c, g, or t
  misc_feature (378)..(378): n is a, c, g, or t
  misc_feature (395)..(395): n is a, c, g, or t
ttttttgcttannnttcntcatgtttttacatggggcattcactgggtntagaggctggccgcaaatacgatgtcccgccgtagcaaggtagccgctgtctccatcttggcacccagcacaggctctcctaccaggcgggctgccccccgcagtgagcgacacatntcagccaggcgntgaatgcagcggaccaccaggccctcaggggtccctgagagccctgccaantcggagaagggntttggggaaantagggtnaggantggatgcantcagcctggggcaggttntccccagccagccntttgcaaaatcccaaacctcaggtantcaccatgccccgggcccattcatntacaacntcaaccagcccaaanttcagctcccccacaanttcctccaccgtttggttcagggccacaag

SEQ ID NO: 296 - DNA, 344 bp, Artificial Sequence
  Description of Artificial sequences:primer
  misc_feature (1)..(344): 3' terminal sequence from clone image:181827.
  misc_feature (11)..(11): n is a, c, g, or t
  misc_feature (13)..(14): n is a, c, g, or t
  misc_feature (153)..(153): n is a, c, g, or t
  misc_feature (168)..(168): n is a, c, g, or t
  misc_feature (179)..(179): n is a, c, g, or t
  misc_feature (185)..(185): n is a, c, g, or t
  misc_feature (194)..(194): n is a, c, g, or t
  misc_feature (208)..(208): n is a, c, g, or t
  misc_feature (285)..(285): n is a, c, g, or t
  misc_feature (288)..(288): n is a, c, g, or t
  misc_feature (297)..(297): n is a, c, g, or t
  misc_feature (300)..(300): n is a, c, g, or t
  misc_feature (305)..(305): n is a, c, g, or t
  misc_feature (307)..(307): n is a, c, g, or t
tttttttgggntnnttttgagtttattcaggggtggggacaggcgggcggctcagtagcaggtgccgtccacctccgccatgacaacagacacattgacatgggtgggtttacccgccaagcgtcgaatggtcttctgtgtgaaggccagcgnagggcctcgtggcanccatgcagganaaggtntcccccttnttccagtcctcggntgccacgcgcagtatgctggtcacaggaaggtggtggtgcccggctgggctcctgccgggatgcccaagtcaggtanttntcgcggggnagntcctntnacccctgcagccagcgaaccagcacgtccttggggtt

SEQ ID NO: 297 - DNA, 461 bp, Artificial Sequence
  Description of Artificial sequences:primer
  misc_feature (1)..(461): 3' terminal sequence from clone image:1847162. tumor protein p53 (li-fraumeni syndrome)(TP53) gene.
tttttcttctgtcttgaacatgagttttttatggcgggaggtagactgaccctttttggacttcaggtggctggagtgagccctgctcccccctggctccttcccagcctgggcatccttgagttccaaggcctcattcagctctcggaacatctcgaagcgctcacgcccacggatctgaagggtgaaatattctccatccagtggtttcttctttggctggggagaggagctggtgttgttgggcagtgctcgcttagtgctccctgggggcagctcgtggtgaggctcccctttcttgcggagattctcttcctctgtgcgccggtctctcccaggacaggcacaaacacgcacctcaaagctgttccgcccgtagattaccactgagtcttccgtgtgatgatggaaggatgggcctccggttatgccgccctgcaggaactttacacatgtagttg

SEQ ID NO: 298 - DNA, 2629 bp, Artificial Sequence
  Description of Artificial sequences:primer
  misc_feature (1)..(2629): tumor protein p53 (li-fraumeni syndrome)(TP53) gene.
acttgtcatggcgactgtccagctttgtgccaggagcctcgcaggggttgatgggattggggttttcccctcccatgtgctcaagactggcgctaaaagttttgagcttctcaaaagtctagagccaccgtccagggagcaggtagctgctgggctccggggacactttgcgttcgggctgggagcgtgctttccacgacggtgacacgcttccctggattggcagccagactgccttccgggtcactgccatggaggagccgcagtcagatcctagcgtcgagccccctctgagtcaggaaacattttcagacctatggaaactacttcctgaaaacaacgttctgtcccccttgccgtcccaagcaatggatgatttgatgctgtccccggacgatattgaacaatggttcactgaagacccaggtccagatgaagctcccagaatgccagaggctgctccccgcgtggcccctgcaccagcagctcctacaccggcggcccctgcaccagccccctcctggcccctgtcatcttctgtcccttcccagaaaacctaccagggcagctacggtttccgtctgggcttcttgcattctgggacagccaagtctgtgacttgcacgtactcccctgccctcaacaagatgttttgccaactggccaagacctgccctgtgcagctgtgggttgattccacacccccgcccggcacccgcgtccgcgccatggccatctacaagcagtcacagcacatgacggaggttgtgaggcgctgcccccaccatgagcgctgctcagatagcgatggtctggcccctcctcagcatcttatccgagtggaaggaaatttgcgtgtggagtatttggatgacagaaacacttttcgacatagtgtggtggtgccctatgagccgcctgaggttggctctgactgtaccaccatccactacaactacatgtgtaacagttcctgcatgggcggcatgaaccggaggcccatcctcaccatcatcacactggaagactccagtggtaatctactgggacggaacagctttgaggtgcgtgtttgtgcctgtcctgggagagaccggcgcacagaggaagagaatctccgcaagaaaggggagcctcaccacgagctgcccccagggagcactaagcgagcactgcccaacaacaccagctcctctccccagccaaagaagaaaccactggatggagaatatttcacccttcagatccgtgggcgtgagcgcttcgagatgttccgagagctgaatgaggccttggaactcaaggatgcccaggctgggaaggagccaggggggagcagggctcactccagccacctgaagtccaaaaagggtcagtctacctcccgccataaaaaactcatgttcaagacagaagggcctgactcagactgacattctccacttcttgttccccactgacagcctcccacccccatctctccctcccctgccattttgggttttgggtctttgaacccttgcttgcaataggtgtgcgtcagaagcacccaggacttccatttgctttgtcccggggctccactgaacaagttggcctgcactggtgttttgttgtggggaggaggatggggagtaggacataccagcttagattttaaggtttttactgtgagggatgtttgggagatgtaagaaatgttcttgcagttaagggttagtttacaatcagccacattctaggtaggtaggggcccacttcaccgtactaaccagggaagctgtccctcatgttgaattttctctaacttcaaggcccatatctgtgaaatgctggcatttgcacctacctcacagagtgcattgtgagggttaatgaaataatgtacatctggccttgaaaccaccttttattacatggggtctaaaacttgacccccttgagggtgcctgttccctctccctctccctgttggctggtgggttggtagtttctacagttgggcagctggttaggtagagggagttgtcaagtcttgctggcccagccaaaccctgtctgacaacctcttggtcgaccttagtacctaaaaggaaatctcaccccatcccacaccctggaggatttcatctcttgtatatgatgatctggatccaccaagacttgttttatgctcagggtcaatttcttttttcttttttttttttttttttctttttctttgagactgggtctcgctttgttgcccaggctggagtggagtggcgtgatcttggcttactgcagcctttgcctccccggctcgagcagtcctgcctcagcctccggagtagctgggaccacaggttcatgccaccatggccagccaacttttgcatgttttgtagagatggggtctcacagtgttgcccaggctggtctcaaactcctgggctcaggcgatccacctgtctcagcctcccagagtgctgggattacaattgtgagccaccacgtggagctggaagggtcaacatcttttacattctgcaagcacatctgcattttcaccccacccttcccctccttctccctttttatatcccatttttatatcgatctcttattttacaataaaactttgctgcca

SEQ ID NO: 299 - DNA, 323 bp, Artificial Sequence
  Description of Artificial sequences:primer
  misc_feature (1)..(323): 3' terminal sequence from clone image:186331. aspartyl-trna synthetase(DARS) gene.
  misc_feature (163)..(163): n is a, c, g, or t
  misc_feature (179)..(179): n is a, c, g, or t
  misc_feature (189)..(189): n is a, c, g, or t
  misc_feature (257)..(257): n is a, c, g, or t
  misc_feature (266)..(266): n is a, c, g, or t
  misc_feature (273)..(273): n is a, c, g, or t
acttacaaaatcagttggccacaaagttacacaaaaactacaattagctttaaaattttattgaaattcaagtttagaatttaacaaattaatacaatattacactgaatactttctaaccagtagtttagctttacataatttctaggcataacttttaagnactgatactttctggntaattttccntgatatgccaattatacattcattaaaatttcagatgctacctgaattattcttatctcaatgacagnatttaaaanaataagntcaaatactgaaaatctaagggcattaacactgggggcccttgtaatata

SEQ ID NO: 300 - DNA, 479 bp, Artificial Sequence
  Description of Artificial sequences:primer
  misc_feature (1)..(479): 5' terminal sequence from clone image:186331. aspartyl-trna synthetase(DARS) gene.
  misc_feature (339)..(339): n is a, c, g, or t
  misc_feature (375)..(375): n is a, c, g, or t
  misc_feature (464)..(464): n is a, c, g, or t
caaatattcaaaggacttcaagaaaggtttcagactgaaattcaaacagtgaataaacagttcccatgtgagccattcaaatttttggagccaactctaagactagaatattgtgaagcattggctatgcttagggaagctggagtcgaaatgggagatgaagacgatctgagcacaccaaatgaaaagctgttgggtcatttggtaaaggaaaagtatgatacagatttttatattcttgataaatatccattggctgtaagacctttctataccatgcctgacccaagaaatcccaaacagtccaactcttacgatatgttcatgagaggagaaganatattgtcaggagctcaaagaatacatgatcctcanctgcttaacaggagagagctttacatcatgggaatttgatttggagaaattaaggcttacattgattccttccgctttgggagcccctnctcatgctggttgga

SEQ ID NO: 301 - DNA, 2271 bp, Artificial Sequence
  Description of Artificial sequences:primer
  misc_feature (1)..(2271): aspartyl-trna synthetase(DARS) gene.
tggccggaattccggggagggagaagcccctttggcctgccttacggaagcctgcgagggagggtggtgtccactgcccagttccgtgtcccgatgcccagcgccacgcagcgcaagagtcaggagaagccgcgggagatcatggacgcggcggaagattatgctaaagagagatatggaatatcttcaatgatacaatcacaagaaaaaccagatcgagttttggttcgggttagagacttgacaatacaaaaagctgatgaagttgtttgggtacgtgcaagagttcatacaagcagagctaaagggaaacagtgcttcttagtcctacgtcagcagcagtttaatgtccaggctcttgtggcggtgggagaccatgcaagcaagcagatggttaaatttgctgccaacatcaacaaagagagcattgtggatgtagaaggtgttgtgagaaaagtgaatcagaaaattggaagctgtacacagcaagacgttgagttacatgttcagaagatttatgtgatcagtttggctgaaccccgtctgcccctgcagctggatgatgctgttcggcctgagcaagaaggagaagaggaaggaagagctactgttaaccaggatacaagattagacaacagagtcattgatcttaggacatcaactagtcaggcagtcttccgtctccagtctggcatctgccatctcttccgagaaactttaattaacaaaggttttgtggaaatccaaactcctaaaattatttcagctgccagtgaaggaggagccaatgtttttactgtgtcatattttaaaaataatgcatacctggctcagtccccacagctatataagcaaatgtgcatttgtgctgattttgagaaggttttctctattggaccagtattcagagcggaagactctaatacccatagacatctaactgagtttgttggtttggacattgaaatggcttttaattaccattaccacgaagttatggaagaaattgctgacaccatggtacaaatattcaaaggacttcaagaaaggtttcagactgaaattcaaacagtgaataaacagttcccatgtgagccattcaaatttttggagccaactctaagactagaatattgtgaagcattggctatgcttagggaagctggagtcgaaatgggagatgaagacgatctgagcacaccaaatgaaaagctgttgggtcatttggtaaaggaaaagtatgatacagatttttatattcttgataaatatccattggctgtaagacctttctataccatgcctgacccaagaaatcccaaacagtccaagtcttacgatatgttcatgagaggagaagaaatattgtcaggagctcaaagaatacatgatcctcaactgctaacagagagagctttacatcatggaaatgatttggagaaaattaaggcttacattgattccttccgctttggagcccctcctcatgctggtggaggcattggattggaacgagttactatgctgtttctgggattgcataatgttcgtcagacctccatgttccctcgtgatcccaaacgactcactccttaaattcacactttgccacttaactccagtgtggatgacagagcgagaccctgcctcaaaaaaaaaaaaaaaaaaaaaaaaaaaaaaaaaaaaaaaaaaaaaaaaaaaaaaaaaaaaaagaaagccacacttattcttttcagtaacctgctagtgcacaggctgtactttaggtacttaaaatatgcactagaataaatttgcaaggccctaaaatatcactgttatttttggagtaattcagtataggttcgtttaaaagagatttttataacttcagacatgcatcagtaggaaataacttgagaaattcatatggttatgttacaaattcatattctgttactacagtaaacgttaagagttttaaacagttaagattgtacaatttttcttcttttctatattacaagggccccagtgttaatgtcttagattttcagtatttgaacttatttttttaaattctgtcattgagataagaataattcaggtagcatctgaaattttaatgaatgtataattggcatatcatggaaaattaaccagaaagtatcagttcttaaaagttatgcctagaaattatgtaaagctaaactactggttagaaagtattcagtgtaatattgtattaatttgttaaattctaaacttgaatttcaataaaattttaaagct

SEQ ID NO: 302 - DNA, 267 bp, Artificial Sequence
  Description of Artificial sequences:primer
  misc_feature (1)..(267): 3' terminal sequence from clone image:1869652. epidermal growth factor (beta-urogastrone)(EGF) gene.
  misc_feature (208)..(208): n is a, c, g, or t
  misc_feature (241)..(241): n is a, c, g, or t
gtttatgtttttggtgattttatttaaataattagaagaaattcatcgttgtctataatgaaaacaaatcaggcaatttacttacaatcttgtaactgaaaatacatacaaattctgtgcaatcacaccaagagggaaaattctgtaggggaaaaggacagtaatgactaagaaactccgaagcctcctgtgtaatattttaaaatanaatgttttcattcaaatattttaaaaaataagnatctaatctgaaaaaatcagtttcta

SEQ ID NO: 303 - DNA, 4877 bp, Artificial Sequence
  Description of Artificial sequences:primer
  misc_feature (1)..(4877): epidermal growth factor (beta-urogastrone)(EGF) gene.
actgttgggagaggaatcgtatctccatatttcttctttcagccccaatccaagggttgtagctggaactttccatcagttcttcctttctttttcctctctaagcctttgccttgctctgtcacagtgaagtcagccagagcagggctgttaaactctgtgaaatttgtcataagggtgtcaggtatttcttactggcttccaaagaaacatagataaagaaatctttcctgtggcttcccttggcaggctgcattcagaaggtctctcagttgaagaaagagcttggaggacaacagcacaacaggagagtaaaagatgccccagggctgaggcctccgctcaggcagccgcatctggggtcaatcatactcaccttgcccgggccatgctccagcaaaatcaagctgttttcttttgaaagttcaaactcatcaagattatgctgctcactcttatcattctgttgccagtagtttcaaaatttagttttgttagtctctcagcaccgcagcactggagctgtcctgaaggtactctcgcaggaaatgggaattctacttgtgtgggtcctgcacccttcttaattttctcccatggaaatagtatctttaggattgacacagaaggaaccaattatgagcaattggtggtggatgctggtgtctcagtgatcatggattttcattataatgagaaaagaatctattgggtggatttagaaagacaacttttgcaaagagtttttctgaatgggtcaaggcaagagagagtatgtaatatagagaaaaatgtttctggaatggcaataaattggataaatgaagaagttatttggtcaaatcaacaggaaggaatcattacagtaacagatatgaaaggaaataattcccacattcttttaagtgctttaaaatatcctgcaaatgtagcagttgatccagtagaaaggtttatattttggtcttcagaggtggctggaagcctttatagagcagatctcgatggtgtgggagtgaaggctctgttggagacatcagagaaaataacagctgtgtcattggatgtgcttgataagcggctgttttggattcagtacaacagagaaggaagcaattctcttatttgctcctgtgattatgatggaggttctgtccacattagtaaacatccaacacagcataatttgtttgcaatgtccctttttggtgaccgtatcttctattcaacatggaaaatgaagacaatttggatagccaacaaacacactggaaaggacatggttagaattaacctccattcatcatttgtaccacttggtgaactgaaagtagtgcatccacttgcacaacccaaggcagaagatgacacttgggagcctgagcagaaactttgcaaattgaggaaaggaaactgcagcagcactgtgtgtgggcaagacctccagtcacacttgtgcatgtgtgcagagggatacgccctaagtcgagaccggaagtactgtgaagatgttaatgaatgtgctttttggaatcatggctgtactcttgggtgtaaaaacacccctggatcctattactgcacgtgccctgtaggatttgttctgcttcctgatgggaaacgatgtcatcaacttgtttcctgtccacgcaatgtgtctgaatgcagccatgactgtgttctgacatcagaaggtcccttatgtttctgtcctgaaggctcagtgcttgagagagatgggaaaacatgtagcggttgttcctcacccgataatggtggatgtagccagctctgcgttcctcttagcccagtatcctgggaatgtgattgctttcctgggtatgacctacaactggatgaaaaaagctgtgcagcttcaggaccacaaccatttttgctgtttgccaattctcaagatattcgacacatgcattttgatggaacagactatggaactctgctcagccagcagatgggaatggtttatgccctagatcatgaccctgtggaaaataagatatactttgcccatacagccctgaagtggatagagagagctaatatggatggttcccagcgagaaaggcttattgaggaaggagtagatgtgccagaaggtcttgctgtggactggattggccgtagattctattggacagacagagggaaatctctgattggaaggagtgatttaaatgggaaacgttccaaaataatcactaaggagaacatctctcaaccacgaggaattgctgttcatccaatggccaagagattattctggactgatacagggattaatccacgaattgaaagttcttccctccaaggccttggccgtctggttatagccagctctgatctaatctggcccagtggaataacgattgacttcttaactgacaagttgtactggtgcgatgccaagcagtctgtgattgaaatggccaatctggatggttcaaaacgccgaagacttacccagaatgatgtaggtcacccatttgctgtagcagtgtttgaggattatgtgtggttctcagattgggctatgccatcagtaataagagtaaacaagaggactggcaaagatagagtacgtctccaaggcagcatgctgaagccctcatcactggttgtggttcatccattggcaaaaccaggagcagatccctgcttatatcaaaacggaggctgtgaacatatttgcaaaaagaggcttggaactgcttggtgttcgtgtcgtgaaggttttatgaaagcctcagatgggaaaacgtgtctggctctggatggtcatcagctgttggcaggtggtgaagttgatctaaagaaccaagtaacaccattggacatcttgtccaagactagagtgtcagaagataacattacagaatctcaacacatgctagtggctgaaatcatggtgtcagatcaagatgactgtgctcctgtgggatgcagcatgtatgctcggtgtatttcagagggagaggatgccacatgtcagtgtttgaaaggatttgctggggatggaaaactatgttctgatatagatgaatgtgagatgggtgtcccagtgtgcccccctgcctcctccaagtgcatcaacaccgaaggtggttatgtctgccggtgctcagaaggctaccaaggagatgggattcactgtcttgatattgatgagtgccaactgggggtgcacagctgtggagagaatgccagctgcacaaatacagagggaggctatacctgcatgtgtgctggacgcctgtctgaaccaggactgatttgccctgactctactccaccccctcacctcagggaagatgaccaccactattccgtaagaaatagtgactctgaatgtcccctgtcccacgatgggtactgcctccatgatggtgtgtgcatgtatattgaagcattggacaagtatgcatgcaactgtgttgttggctacatcggggagcgatgtcagtaccgagacctgaagtggtgggaactgcgccacgctggccacgggcagcagcagaaggtcatcgtggtggctgtctgcgtggtggtgcttgtcatgctgctcctcctgagcctgtggggggcccactactacaggactcagaagctgctatcgaaaaacccaaagaatccttatgaggagtcgagcagagatgtgaggagtcgcaggcctgctgacactgaggatgggatgtcctcttgccctcaaccttggtttgtggttataaaagaacaccaagacctcaagaatgggggtcaaccagtggctggtgaggatggccaggcagcagatgggtcaatgcaaccaacttcatggaggcaggagccccagttatgtggaatgggcacagagcaaggctgctggattccagtatccagtgataagggctcctgtccccaggtaatggagcgaagctttcatatgccctcctatgggacacagacccttgaagggggtgtcgagaagccccattctctcctatcagctaacccattatggcaacaaagggccctggacccaccacaccaaatggagctgactcagtgaaaactggaattaaaaggaaagtcaagaagaatgaactatgtcgatgcacagtatcttttctttcaaaagtagagcaaaactataggttttggttccacaatctctacgactaatcacctactcaatgcctggagacagatacgtagttgtgcttttgtttgctcttttaagcagtctcactgcagtcttatttccaagtaagagtactgggagaatcactaggtaacttattagaaacccaaattgggacaacagtgctttgtaaattgtgttgtcttcagcagtcaatacaaatagatttttgtttttgttgttcctgcagccccagaagaaattaggggttaaagcagacagtcacactggtttggtcagttacaaagtaatttctttgatctggacagaacatttatatcagtttcatgaaatgattggaatattacaataccgttaagatacagtgtaggcatttaactcctcattggcgtggtccatgctgatgattttgccaaaatgagttgtgatgaatcaatgaaaaatgtaatttagaaactgatttcttcagaattagatggccttattttttaaaatatttgaatgaaaacattttatttttaaaatattacacaggaggccttcggagtttcttagtcattactgtccttttcccctacagaattttccctcttggtgtgattgcacagaatttgtatgtattttcagttacaagattgtaagtaaattgcctgatttgttttcattatagacaacgatgaatttcttctaattatttaaataaaatcaccaaaaacat

SEQ ID NO: 304 - DNA, 328 bp, Artificial Sequence
  Description of Artificial sequences:primer
  misc_feature (1)..(328): 3' terminal sequence from clone image:190103. ribosomal protein l29 pseudogene 2(RPL29P2) gene.
  misc_feature (11)..(13): n is a, c, g, or t
  misc_feature (277)..(277): n is a, c, g, or t
caggcttaaannnaaaccaatagcgcaggaggaccccagccccatgcagacggcagcccggggtgggtggcacctgtccttctgtcctcacgttggcagacagagatatctactctgaagtctttgtagggcactgggcagctttgggagcctgagctgaaactgaagctggagctgcagcctgggccttggtttgatccttggccttggctttgggcgggcacagcctgagccccttggccatgcgggcacgagcaagcttcccaaggttggggtnggcaatgtaggcaagtcgatcaagtttatgggctgacaaccttttggatct

SEQ ID NO: 305 - DNA, 424 bp, Artificial Sequence
  Description of Artificial sequences:primer
  misc_feature (1)..(424): 5' terminal sequence from clone image:190103. ribosomal protein l29 pseudogene 2(RPL29P2) gene.
  misc_feature (61)..(61): n is a, c, g, or t
  misc_feature (398)..(398): n is a, c, g, or t
  misc_feature (405)..(405): n is a, c, g, or t
  misc_feature (414)..(414): n is a, c, g, or t
gggaagttatactagaataggcagcccaggcttccggttctaggtgcttcaggagccgtgncttaaggtgcagacatggccaagtccacaccatacaccaccagtcccgaaaatggcacagaaatggtatcaagaaaccgcgatcacaaagatacaaatctcttaagggggtggactccaagttcctgaggaacatgcgctttgccaagaagcacaaaagaagggcctaaagaagatgcacaccaacaatgccaaggccatgagtccacgtgccgaggctctcaaggccctcgtaaagcccaaggaggttaagcccaagatcccaaagggtggtcagccataaacttgatcgacttgcctacattgcccaccccaaccttgggaagcttgcttcgtgnccgcatngccaagggncttcaggctg

SEQ ID NO: 306 - DNA, 685 bp, Artificial Sequence
  Description of Artificial sequences:primer
  misc_feature (1)..(685): 3' terminal sequence from clone image:1902297. eukaryotic translation elongation factor 1 beta 2(EEF1B2) gene.
  misc_feature (573)..(573): n is a, c, g, or t
tttttttaatctttcaatcttttatttaaatgccatgatccaggatggattttagatcttgttgaaagcagccacatccatggactgcacatagtcctcaaaagcagtgatctgctcctccagcatatctgttccaactttatcatcttcaactacacactgtatttgaagtttcttaattccgtatcccactggaactagtttagatgagccccagactaagccgtctgcttgaatgcttctgacgcactcctctaatttcgccatatctgtctcatcatcccaaggtttcacatctagtaagatggaagacttggcaacaagtgcaggttttttggctttctttgattcatattgtgcaagacgttcttcccttagcctctttgcttcttcactttcctcctcatcatcagatccaaagaggtcaatgtcatcatcatctttactatctgtagctccacttcctgtagtgtcttccacatcggcaggaccatatttgcccaaagctttcttcactcctggcaggctggccttttccttttcgtaagacttgatgtgattatacccacgtanggcatgacacaagtcggcaggcgttgggctggacacggctttaaaatactgccaccatctgctttggatggcacatacccccttgatgtaagctctttgcccgcagggtaat

SEQ ID NO: 307 - DNA, 961 bp, Artificial Sequence
  Description of Artificial sequences:primer
  misc_feature (1)..(961): eukaryotic translation elongation factor 1 beta 2(EEF1B2) gene.
ggacaatttgtgggccatttaattcagggcccccaattcgtacgtggagaagtgggaatgcaaaagtactttgacctttaaccttcggtccggcgcggtggagggaaacgcctccgtctctatataaggaattttccggtctcttcgggtcctttttcctctcttcagcgtggggcgcccacaatttgcgcgctctctttctgctgctccccagctctcggatacagccgacaccatgggtttcggagacctgaaaagccctgccggcctccaggtgctcaacgattacctggcggacaagagctacatcgaggggtatgtgccatcacaagcagatgtggcagtatttgaagccgtgtccagcccaccgcctgccgacttgtgtcatgccctacgttggtataatcacatcaagtcttacgaaaaggaaaaggccagcctgccaggagtgaagaaagctttgggcaaatatggtcctgccgatgtggaagacactacaggaagtggagctacagatagtaaagatgatgatgacattgacctctttggatctgatgatgaggaggaaagtgaagaagcaaagaggctaagggaagaacgtcttgcacaatatgaatcaaagaaagccaaaaaacctgcacttgttgccaagtcttccatcttactagatgtgaaaccttgggatgatgagacagatatggcgaaattagaggagtgcgtcagaagcattcaagcagacggcttagtctggggctcatctaaactagttccagtgggatacggaattaagaaacttcaaatacagtgtgtagttgaagatgataaagttggaacagatatgctggaggagcagatcactgcttttgaggactatgtgcagtccatggatgtggctgctttcaacaagatctaaaatccatcctggatcatggcatttaaataaaagattgaaagattaaaa

SEQ ID NO: 308 - DNA, 424 bp, Artificial Sequence
  Description of Artificial sequences:primer
  misc_feature (1)..(424): 3' terminal sequence from clone image:1912132. serine/threonine kinase 6(STK6) gene.
gacatagatacttatttatttgcatatttaaagtttacacacatgctatgactccaatgttttaaaaaaataagcccttaacagctctgagacacatggcctcttctgtatcccaagcaaatccctaaatggaggagagcacgtgttcctatttttcacactctcatatgggagataagtggttaaggaggactagaaacccaatcaggcctaccggggtgccggacagacacacagcattcctaaaggaatgccaccagagaaaaaatacaagtctgtacatatatctttattttcatacttaaaaagaatcacatactcattccaacagctttaccaggcttcgccaacccaataagttacacactcactcaggtactaggaaggttattgcacagctccttaactgatcggggtcagggca

SEQ ID NO: 309 - DNA, 412 bp, Artificial Sequence
  Description of Artificial sequences:primer
  misc_feature (1)..(412): 3' terminal sequence from clone image:191548. t-cell acute lymphocytic leukemia 1(TAL1) gene.
  misc_feature (1)..(1): n is a, c, g, or t
  misc_feature (4)..(4): n is a, c, g, or t
  misc_feature (7)..(7): n is a, c, g, or t
  misc_feature (115)..(115): n is a, c, g, or t
  misc_feature (231)..(231): n is a, c, g, or t
  misc_feature (240)..(240): n is a, c, g, or t
  misc_feature (282)..(282): n is a, c, g, or t
  misc_feature (301)..(301): n is a, c, g, or t
  misc_feature (388)..(388): n is a, c, g, or t
  misc_feature (398)..(398): n is a, c, g, or t
  misc_feature (408)..(408): n is a, c, g, or t
nccnttntaaaacttttatttagaaatcttcccgatacatcctcacatatatatacacatcatcaccacatgggttttttttgctaaagagtcacacacccacagtgttggcctntgggctgtacaaaggtcaaggtacctggagcggttactcctcttctgcagaaaaatgcagagaccaacgcaattcatcacatacagtacaacgttgacggaaagtgctgggcccgnccacagaancaatgcactatgtacacgggcagggggcaagtcttcagcagngggtcacgtaccatcgaantcacaagtacggacagacccacccccaaaaggccgaaatagttgtcggctgactacagatgctgtgccctttgttttattttggganaaggtttaanggttgtaccntttt

SEQ ID NO: 310 - DNA, 498 bp, Artificial Sequence
  Description of Artificial sequences:primer
  misc_feature (1)..(498): 3' terminal sequence from clone image:191714. ribosomal protein s15a(RPS15A) gene.
  misc_feature (361)..(361): n is a, c, g, or t
  misc_feature (393)..(393): n is a, c, g, or t
  misc_feature (450)..(450): n is a, c, g, or t
  misc_feature (455)..(455): n is a, c, g, or t
  misc_feature (480)..(480): n is a, c, g, or t
  misc_feature (487)..(487): n is a, c, g, or t
  misc_feature (498)..(498): n is a, c, g, or t
atgtattacatccctagaaaaagaattccaggattttccctgctgtgtgttttcatcttgcttccttatggtccatgatgccagccgaggttgtcagtgcaatgaaaccaaactggcaggatggaagcagattattctgccatttttctagatctttgagttgcacatcaaatctgaggctgatcactccacacttgtttagcccgcctgtgaggttcacaacaattttcccagctctgtgatcatcaatgatttcaaatttgccaatgtaactgagttagggagtttttcctgccgatggggtttgtgggtctcgctaactttgagggaatgaagctggcgggaccttcacgggtgagtntttacaggcttaaaaaggaggtccacggaccngggagagtgaggcagcaggcgcagttttactggaacaaagttgaaaggggaaggttnccacnggtgggaaggggggacccagaaggntttgccnttgctgggctn

SEQ ID NO: 311 - DNA, 1165 bp, Artificial Sequence
  Description of Artificial sequences:primer
  misc_feature (1)..(1165): ribosomal protein s15a(RPS15A) gene.
gaattccgagcttagttggaagacatatattttttggaagacgtggattttctggaagacatggcttggttggaagacgtggattttctggaagacgtacctttgttggaagacatacctttgttggaagacgtacctttgttggaagacgtacctttgttggaagacacaagtaggctggaagacattaatttgatggaagacatggctttgttggaagacgtggatttgctggaagacacggatttcctggaagacctggatttttcggaagctatggatttgagggaagacaaggattttctggaagacatggatagtctggaagacatggctttgttggaagacgtggacttgctggaagacacggatttcctggaagacccggattttttggaagctatagatttaagggaagacaaggattttctggaagacatggatagtctggaagacctgaggccattggaagatgtggattttctggaagacatggcttttttggaagacgtagattttcaggaagacccaaattatccggaagacttggattgttgggaagacgtggattttctggaagactggaggttactggaagacatggattttctggaagacatggattttctggaagacgtggatcttcaggaagacatatattggctggaagacctggattttttccggaagatgtggattgactggaagacctggatttggtggaagacgtagatttttctggaagacactgactgactggaagacctggatttctttctggaagacactgattgactggaagacctggatttctttctggaagacactgattgactggaagatctagatttttctggaagaactagatttactggaagacttggatttggtggaagacacagatttttctggaagacatggattagctggaagatctgtatttgatggaagaccttgaaattattggaagacatggatttcctggaagacgtggattttcctggaagatctggatttggtggaagaccagtaattgctggaagactggatttgctggaagacttgatttactggaagacttggagcttcttggaagacatggattgtccggaagacatggattgtctggaagatgtggattttctggaagctcaggattatctgg

SEQ ID NO: 312 - DNA, 476 bp, Artificial Sequence
  Description of Artificial sequences:primer
  misc_feature (1)..(476): 3' terminal sequence from clone image:192242. ribosomal protein s19(RPS19) gene.
  misc_feature (1)..(1): n is a, c, g, or t
  misc_feature (5)..(5): n is a, c, g, or t
  misc_feature (183)..(183): n is a, c, g, or t
  misc_feature (215)..(215): n is a, c, g, or t
  misc_feature (225)..(225): n is a, c, g, or t
  misc_feature (277)..(277): n is a, c, g, or t
  misc_feature (301)..(301): n is a, c, g, or t
  misc_feature (318)..(318): n is a, c, g, or t
  misc_feature (364)..(364): n is a, c, g, or t
  misc_feature (401)..(401): n is a, c, g, or t
  misc_feature (444)..(444): n is a, c, g, or t
  misc_feature (450)..(450): n is a, c, g, or t
  misc_feature (465)..(465): n is a, c, g, or t
naacntttgaggcaatttattaacccagcatggtttgttctaatgcttcttgttggcaactgccacctgtccagcgattctgtccagatctctctgtccctgacgtgtcagtttgcggcccccatcttggtccttttccaccatttttagcccctccagggcttggaggacccggtgggccanattcttgggagcctcggctaaagtggccaggnatgccgccanttctctgacatcccccatagatcttgggtcatggagccaaccccagcgccancccagaggtacaggtgccacgctntggaagcagctcgcgtntacaaccagttctcatcgtaggggagcaagctctttgtgcttgggncagcagctttgaagggtgttccacccatttcgggganttttcaggtttcccagatttttttgaggaagggttgccagagntttgantgaattcctgttggntcaaaaatttt

SEQ ID NO: 313 - DNA, 569 bp, Artificial Sequence
  Description of Artificial sequences:primer
  misc_feature (1)..(569): ribosomal protein s19(RPS19) gene.
cgcccgacttgtgcgcccgggaaaccccgtcgttccctttcccctggctggcagcgcggaggccgcacgatgcctggagttactgtaaaagacgtgaaccagcaggagttcgtcagagctctggcagccttcctcaaaaagtccgggaagctgaaagtccccgaatgggtggataccgtcaagctggccaagcacaaagagcttgctccctacgatgagaactggttctacacgcgagctgcttccacagcgcggcacctgtacctccggggtggcgctggggttggctccatgaccaagatctatgggggacgtcagagaaacggcgtcatgcccagccacttcagccgaggctccaagagtgtggcccgccgggtcctccaagccctggaggggctgaaaatggtggaaaaggaccaagatggcggccgcaaactgacacctcagggacaaagagatctggacagaatcgccggacaggtggcagctgccaacaagaagcattagaacaaaccatgctgggttaataaattgcctcattcgtaaaaaaaaaaaaaaaaaaaaaaaaa

SEQ ID NO: 314 - DNA, 484 bp, Artificial Sequence
  Description of Artificial sequences:primer
  misc_feature (1)..(484): 3' terminal sequence from clone image:192515. hrd1 protein(HRD1) gene.
  misc_feature (18)..(19): n is a, c, g, or t
  misc_feature (266)..(266): n is a, c, g, or t
  misc_feature (297)..(297): n is a, c, g, or t
  misc_feature (372)..(372): n is a, c, g, or t
  misc_feature (428)..(428): n is a, c, g, or t
  misc_feature (437)..(437): n is a, c, g, or t
  misc_feature (454)..(454): n is a, c, g, or t
  misc_feature (470)..(470): n is a, c, g, or t
tttttgttaatgcaaganntttatttggctgtatatacaatttaagctattaaaatttgtacaatatttacaaattaaataatcatctgaaactgtctccaacaactcttgtaacacaaaaccaaggggaaaagacaggggcaggcaggtcccagctcctgtggtccctccttggcacagagccttttctaaactggaaagaccagggagtctggcactcctgttcctctttcccgggattaagcattcaacttcaaaagacaaantttaagccaaaagacactagtaaggaagtanttccaattctaaacttcagaagttctgccagttgaggaagtgggccttccttggggcgctggggattgcagtggntcagggagcagggcgcactgggcccttgccggggagtgcgggctggggcagtgctngctggggtngaggacaggttcagttntcactttgaggaaggntgcagggggaaagg

SEQ ID NO: 315 - DNA, 3074 bp, Artificial Sequence
  Description of Artificial sequences:primer
  misc_feature (1)..(3074): hrd1 protein(HRD1) gene.
gggggtggggagtgttgttaaccggaggggcagccgcagtcgcgcggattgagcgggctcgcggcgctgggttcctggtctccgggccagggcaatgttccgcacggcagtgatgatggcggccagcctggcgctgaccggggctgtggtggctcacgcctactacctcaaacaccagttctaccccactgtggtgtacctgaccaagtccagccccagcatggcagtcctgtacatccaggcctttgtccttgtcttccttctgggcaaggtgatgggcaaggtgttctttgggcaactgagggcagcagagatggagcaccttctggaacgttcctggtacgccgtcacagagacttgtctggccttcaccgtttttcgggatgacttcagcccccgctttgttgcactcttcactcttcttctcttcctcaaatgtttccactggctggctgaggaccgtgtggactttatggaacgcagccccaacatctcctggctctttcactgccgcattgtctctcttatgttcctcctgggcatcctggacttcctcttcgtcagccacgcctatcacagcatcctgacccgtggggcctctgtgcagctggtgtttggctttgagtatgccatcctgatgacgatggtgctcaccatcttcatcaagtatgtgctgcactccgtggacctccagagtgagaacccctgggacaacaaggctgtgtacatgctctacacagagctgtttacaggcttcatcaaggttctgctgtacatggccttcatgaccatcatgatcaaggtgcacaccttcccactctttgccatccggcccatgtacctggccatgagacagttcaagaaagctgtgacagatgccatcatgtctcgccgagccatccgcaacatgaacaccctgtatccagatgccaccccagaggagctccaggcaatggacaatgtctgcatcatctgccgagaagagatggtgactggtgccaagagactgccctgcaaccacattttccataccagctgcctgcgctcctggttccagcggcagcagacctgccccacctgccgtatggatgtccttcgtgcatcgctgccagcgcagtcaccaccacccccggagcctgcggatcaggggccaccccctgccccccaccccccaccactcttgcctcagccccccaacttcccccagggcctcctgcctccttttcctccaggcatgttcccactgtggccccccatgggcccctttccacctgtcccgcctccccccagctcaggagaggctgtggctcctccatccaccagtgcagcagccctttctcggcccagtggagcagctacaaccacagctgctggcaccagtgctactgctgcttctgccacagcatctggcccaggctctggctctgccccagaggctggccctgcccctggtttccccttccctcctccctggatgggtatgcccctgcctccaccctttgccttccccccaatgcctgtgccccctgcgggctttgctgggctgaccccagaggagctacgagctctggagggccatgagcggcagcacctggaggcccggctgcagagcctgcgtaacatccacacactgctggacgccgccatgctgcagatcaaccagtacctcaccgtgctggcctccttggggcccccccggcctgccacttcagtcaactccactgaggagactgccactacagttgttgctgctgcctcctccaccagcatccctagctcagaggccacgaccccaaccccaggagcctccccaccagcccctgaaatggaaaggcctccagctcctgagtcagtgggcacagaggagatgcctgaggatggagagcccgatgcagcagagctccgccggcgccgcctgcagaagctggagtctcctgttgcccactgacactgccccagcccagccccagcctctgctcttttgagcagccctcgctggaacatgtcctgccaccaagtgccagctccctctctgtctgcaccagggagtagtacccccagctctgagaaagaggcggcatcccctaggccaagtggaaagaggctggggttcccatttgactccagtcccaggcagccatggggatctcgggtcagttccagccttcctctccaactcttcagccctgtgttctgctggggccatgaaggcagaaggtttagcctctgagaagccctcttcttcccccacccctttccaggagaaggggctgcccctccaagccctacttgtatgtgcggagtcacactgcagtgccgaacagtattagctcccgttcccaagtgtggactccagaggggctggaggcaagctatgaacttgctcgctggcccacccctaagactggtacccatttccttttcttaccctgatctccccagaagcctcttgtggtggtggctgtgccccctatgccctgtggcatttctgcgtcttactggcaaccacacaactcagggaaaggaatgcctgggagtgggggtgcaggcgggcagcactgagggaccctgccccgcccctccccccaggcccctttcccctgcagcttctcaagtgagactgacctgtctcacccagcagccactgcccagccgcactccaggcaagggccagtgcgcctgctcctgaccactgcaatcccagcgcccaaggaaggccacttctcaactggcagaacttctgaagtttagaattggaattacttccttactagtgtcttttggcttaaattttgtcttttgaagttgaatgcttaatcccgggaaagaggaacaggagtgccagactcctggtctttccagtttagaaaaggctctgtgccaaggagggaccacaggagctgggacctgcctgcccctgtcttttccccttggttttgtgttacaagagttgttggagacagtttcagatgattatttaatttgtaaatattgtacaaattttaatagcttaaattgtatatacagccaaataaaaacttgcattaacaaaaaaaaaaaaaaaaaaaaaaaaa

SEQ ID NO: 316 - DNA, 290 bp, Artificial Sequence
  Description of Artificial sequences:primer
  misc_feature (1)..(290): 3' terminal sequence from clone image:192581. protein tyrosine phosphatase, non-receptor type 21(PTPN21) gene.
  misc_feature (53)..(53): n is a, c, g, or t
  misc_feature (98)..(99): n is a, c, g, or t
  misc_feature (211)..(211): n is a, c, g, or t
  misc_feature (213)..(213): n is a, c, g, or t
  misc_feature (227)..(227): n is a, c, g, or t
  misc_feature (274)..(274): n is a, c, g, or t
gagcggcggcccgtggtgggcgcggtcagctgccggagctgaccaatgcgcantgcaggcgcaggactacccgtctcccaacatcatgcggacgaggnngtaccggccacccccaccctacccgccccccaggcccgccaacagcacgccagacctgtcccgccacctttacatcagcagcagcaaccccgacctcatcacgcggcgggcnanccactcggtgcaanacgttccaggaggacagcctgcccgtggcgcactcgctgcaggaggncagcgagcccctcacc

SEQ ID NO: 317 - DNA, 4234 bp, Artificial Sequence
  Description of Artificial sequences:primer
  misc_feature (1)..(4234): protein tyrosine phosphatase, non-receptor type 21(PTPN21) gene.
gcccatgagcgcgccgcggcccgggctggcgtgcgggtgcggctgcggcggccgcgcggcggggccccgggaggcgggtcgctgagcggggcgcgcggccccgaggatgcgggagcgggagcgggagcagcgctggcgtcaatgctcccttcctcgggccattggagactccgttgctttttaatggcggcagcggctgctgggtgagcagctggaggccggacagtgttcgtcccatccggagaggatcgctttctcctggcgtcaccagcgctgggttggtgggggtagcttttccctctttgctcctccattcttgaagaaagaagaagatgccactgccatttgggttgaaactgaaacgcacccggcgctacacggtgtccagcaagagttgcctggttgcccggatccaactgcttaataacgagtttgtggagttcaccctgtccgtggagagcactggccaggaaagcctcgaggccgtggcccagaggctggagctgcgggaggtcacttacttcagcctctggtactacaacaagcaaaatcagcgccggtgggtagatttggaaaaacctttgaagaagcagctggataaatatgcattggaacctaccgtctattttggagtggtgttttatgtgccttcagtttctcagctgcagcaggagattaccaggtatcagtattatctgcaactgaagaaagatatcttggaaggaagtattccttgtaccttagaacaagcaattcagctagcaggcttagctgttcaagcggattttggtgactttgatcagtatgaatcccaggactttcttcagaaatttgccttgtttcctgtgggatggttacaagatgaaaaagtattggaagaagcaacccaaaaagtggccttactacatcagaaatacagagggctcacagctcctgatgctgaaatgctgtacatgcaggaggtagagagaatggatggctatggagaagagagctaccctgctaaggatagccaaggaagtgacatatccattggagcgtgtcttgaaggtatctttgtgaaacacaagaatggaaggcatcctgtggtatttaggtggcatgacattgccaacatgtcccacaacaagtccttttttgcattagagctggcaaataaagaggagaccattcaatttcaaactgaagacatggaaacagcaaaatacatttggagactctgtgttgcgcgacacaagttttacagactaaaccagtgtaacctgcaaactcagactgtcacagtgaacccaatcaggaggaggtcttcttcaaggatgtctctgcctaaaccccagccctacgtgatgcctcccccaccgcagttgcactataatggacattatacagaaccatatgcttcttcccaagataacctctttgtgcccaaccagaacggatactactgtcactctcagacaagcttggatagagcccagattgacttcaacggtcggatccgtaatggcagtgtctacagtgcacacagcaccaactccttaaataatcctcagccctacttgcagccctcgccgatgtcgtccaaccctagcatcaccgggagtgacgtcatgaggcctgactacctcccgtcccatcggcacagcgccgtgatacccccgtcctaccgccccaccccagactatgagactgtgatgaagcagctcaacaggggcctggtgcatgcggaacggcagagccactcgctgcgaaacctcaacatcggcagctcgtacgcctacagcaggcccgcggcgctggtctacagccagcccgagatccgcgagcacgcacagctcccctcgccagcggccgcacactgcccgttcagcctgagctacagcttccacagcccgtctccctacccctaccctgccgagcggcggcccgtggtgggcgcggtcagcgtgccggagctgaccaatgcgcagctgcaggcgcaggactacccgtctcccaacatcatgcggacgcaggtgtaccggccacccccaccctacccgccccccaggcccgccaacagcacgccagacctgtcccgccacctttacatcagcagcagcaaccccgacctcatcacgcggcgcgtgcaccactcggtgcaaacgttccaggaggacagcctgcccgtggcgcactcgctgcaggaggtcagcgagcccctcaccgccgcgcgccacgcgcagctgcacaaacggaacagcatcgaggtggccgggctcagccacggcctggagggcctgcggctcaaggagcgcaccctatccgcgtcggcggcagaggtggcgccgcgagccgtctcggtgggctcccagcccagcgttttcaccgagaggacacagcgagaagggccggaggaggcggagggcttgaggtacggccataagaagtccctgtcggacgccaccatgctaatccacagcagcgaggaggaggaggacgaggacttcgaggaggagagcggggcccgggcgccccctgcacgtgcgcgcgagcctcggcccggcctggcccaggacccacctggctgccctcgcgtcctgctcgccgggcccctgcacatcctggagcccaaggcccacgtcccagacgcggagaagaggatgatggacagcagccccgtccgcacgaccgcagaggcccagcggccctggagagacgggctgctgatgccctccatgtcggagtccgacctcaccacgtcaggccgctaccgagcccggagggactctctgaagaaaaggccggtgtcggaccttctctctgggaagaagaacatcgtggaagggctcccgcctctagggggaatgaaaaagactcgagtagatgcaaaaaaaattggtcctcttaaactggctgccctaaatggactctccctatctcgagtgcctctgcctgatgaaggaaaggaagtggctaccagagcaacgaatgatgaaaggtgtaaaattctggaacaacgattagaacaaggaatggtattcacagaatatgaaagaattcttaagaaacggctagttgatggggagtgctcaacagcacgactccctgaaaatgcagaaagaaatcgattccaagatgttcttccttatgatgatgcgagagtggagttggtcccaactaaagaaaacaacactggttacatcaacgcatcacatattaaggtctctgtcagtggaatcgaatgggattatattgccacacagggaccattacagaatacctgtcaagatttttggcagatggtatgggaacagggaattgcaattatagcaatggtgacagcagaagaggagggtggaagggagaagagctttaggtactggccacgacttggttccaggcacaacactgtcacctatggaaggtttaagatcacgacccggttccgcacagactctggctgctatgccaccacaggcctgaagatgaagcacctccttaccgggcaagagaggaccgtctggcacctccaatacacagactggcctgaacatggctgtccagaagacctcaagggatttttatcatatcttgaagagatccagtctgttcgacgccatacaaatagcacaagtgatccccaaagccccaaccctccgttgttggtccactgcagtgctggggtaggaaggactggcgtggtgattttgtcggagatcatgatcgcctgcctggaacacaatgaggtgctggacatcccgagagtgctggacatgctgaggcaacagagaatgatgctggtgcagactctctgccagtacacatttgtgtacagagtcctcatccagttcctgaaaagctccaggctcatctaagctcccacaatttcttacggggccagtcatgtgaagcgtttacagcttaaaaaaaaagcgcttgcctaactcatactttcccgttgacacttgatccacgcagcgtggcactgggacgtaagtggcgcagtctgaatggcggcacgctgaaggaaacgtgcgaagcacaggctgaagaggggtttctaacctgggaaaggtgctcaaggaggacttggtttcaagggccttgccctgccccggtctgtccggtttgcagtacttgcacacattttggagattgtattttctagacaattctctattttactgaagctatgctgggcaattctggcaatcattaaagtgcatagatttctatcttaaaaaaaaaaaaa

SEQ ID NO: 318 - DNA, 366 bp, Artificial Sequence
  Description of Artificial sequences:primer
  misc_feature (1)..(366): 3' terminal sequence from clone image:193672. nadh dehydrogenase (ubiquinone) 1 alpha subcomplex, 4, 9kda(NDUFA4) gene.
aaaaaccattgttaaaaactgcacacacttcaacagccagtaagagaaactcaaaggtttccattttgccagtgtcagatgctggagtatccttcccaatttacttttgtataatttccagttccagttgttatgtatgctctagtgaagttaccaacagtctatacacaaaatggaagtgttttactaaagcagcttaaagtcgtattttcaaactacagaaattcaagaaattctttaaattctaatagttaatttcctatactctaaagttcagagcatactttcagcataaaaaagtgacacatatcaagtttcagttatttattgatttaatcattgtaatctccaataggggttacaata

SEQ ID NO: 319 - DNA, 480 bp, Artificial Sequence
  Description of Artificial sequences:primer
  misc_feature (1)..(480): 5' terminal sequence from clone image:193672. nadh dehydrogenase (ubiquinone) 1 alpha subcomplex, 4, 9kda(NDUFA4) gene.
  misc_feature (40)..(40): n is a, c, g, or t
  misc_feature (417)..(417): n is a, c, g, or t
  misc_feature (423)..(423): n is a, c, g, or t
  misc_feature (429)..(429): n is a, c, g, or t
  misc_feature (439)..(439): n is a, c, g, or t
gcctggtggctaggtcggttctctcctttccagtcggagnctctgccgcaaacatgctccgccagatcatcggtcaggccaagaagcatccgagcttgatccccctctttgtatttattggaactggagctactggagcaacactgtatctcttgcgtctggcattgttcaatccagatgtttgttgggacagaaataacccagagccctgggaacaaactgggtcccaatgatcaatacaagttctactcagtgaatgtggattacagcaagctgaagaaggaacgtccagatttctaaatgaaatgtttcactataacgctgctttagaatgaaggtcttccagaagccacatccgcacaattttccacttaaccagggaatatttctcctctaaatggcatgaaattcatgttnggaganctctantgtaatctcnttttgggggttacatggttaaatcattaaataactgaaatt

SEQ ID NO: 320 - DNA, 518 bp, Artificial Sequence
  Description of Artificial sequences:primer
  misc_feature (1)..(518): nadh dehydrogenase (ubiquinone) 1 alpha subcomplex, 4, 9kda(NDUFA4) gene.
ccgtagtgtctcattgcagataatttttagcttagggcctggtggctaggtcggttctctcctttccagtcggagacctctgccgcaaacatgctccgccagatcatcggtcaggccaagaagcatccaagcttgatccccctctttgtatttattggaactggagctactggagcaacactgtatctcttgcgtctggcattgttcaatccagatgtttgttgggacagaaataacccagagccctggaacaaactgggtcccaatgatcaatacaagttctactcagtgaatgtggattacagcaagctgaagaaggaacgtccagatttctaaatgaaatgtttcactataacgctgctttagaatgaaggtcttccagaagccacatccgcacaattttccacttaaccaggaaatatttctcctctaaatgcatgaaatcatgttggagatctctattgtaatctctattggagattacaatgattaaatcaataaataactgaaaaaaaaaa

SEQ ID NO: 321 - DNA, 335 bp, Artificial Sequence
  Description of Artificial sequences:primer
  misc_feature (1)..(335): 3' terminal sequence from clone image:194350. tumor susceptibility gene 101(TSG101) gene.
  misc_feature (1)..(3): n is a, c, g, or t
  misc_feature (7)..(7): n is a, c, g, or t
  misc_feature (10)..(10): n is a, c, g, or t
nnntatnaanacaaattttatttagcagtcccaacattcagcacaaaaagtttacagaggatagaaagtgcattaataaaagccagtctttaccaaaagaaaacagaaaatatattattgattcaaaatattttacacttgaatgataaactgcaataacttattctgggcacctactgataaaaggaagagaagaatactttaagaagagctcaacctccagctggtatcagagaagtcagtagaggtcactgagaccggcagtctttcttgctttttgcattagtgccctcagctgggaactgtttacggggacagaagacgtacatgcttca

SEQ ID NO: 322 - DNA, 493 bp, Artificial Sequence
  Description of Artificial sequences:primer
  misc_feature (1)..(493): 5' terminal sequence from clone image:194350. tumor susceptibility gene 101(TSG101) gene.
  misc_feature (436)..(436): n is a, c, g, or t
accatccgagcctctctcatctctgcggtcagtgacaaactgagatggcggatgaaggaggaaatggatcgtgcccaggcagagctcaatgccttgaaacgaacagaagaagacctgaaaaagggtcaccagaaactggaagagatggttacccgtttagatcaagaagtagccgaggttgataaaaacatagaacttttgaaaaagaaggatgaagaactcagttctgctctggaaaaaatggaaaatcagtctgaaaacaatgatatcgatgaagttattattcccacagctcccttatacaaacagatcctgaatctgtatgcagaaggaaaacgctatttgaagacactatccttttacttggggagaagcctttgaggaaggggcgtgattagacctgggatgttcttcctggaggcttgttacgtctttntgttccccttaaacagtttcccgctgaggggcacttattgccaaaaaggcaaggaaa

SEQ ID NO: 323 - DNA, 1550 bp, Artificial Sequence
  Description of Artificial sequences:primer
  misc_feature (1)..(1550): tumor susceptibility gene 101(TSG101) gene.
gtagtggtgccgacttcctgttgtttgaggccgggttgggggtgtgcgattgtgtgggacggtctggggcagcccagcagcggctgaccctctgcctgcggggaagggagtcgccaggcggccgtcatggcggtgtcggagagccagctcaagaaaatggtgtccaagtacaaatacagagacctaactgtacgtgaaactgtcaatgttattactctatacaaagatctcaaacctgttttggattcatatgtttttaacgatggcagttccagggaactaatgaacctcactggaacaatccctgtgccttatagaggtaatacatacaatattccaatatgcctatggctactggacacatacccatataatccccctatctgttttgttaagcctactagttcaatgactattaaaacaggaaagcatgttgatgcaaatgggaagatatatcttccttatctacatgaatggaaacacccacagtcagacttgttggggcttattcaggtcatgattgtggtatttggagatgaacctccagtcttctctcgtcctatttcggcatcctatccgccataccaggcaacggggccaccaaatacttcctacatgccaggcatgccaggtggaatctctccatacccatccggataccctcccaatcccagtggttacccaggctgtccttacccacctggtggtccatatcctgccacaacaagttctcagtacccttctcagcctcctgtgaccactgttggtcccagtagggatggcacaatcagcgaggacaccatccgagcctctctcatctctgcggtcagtgacaaactgagatggcggatgaaggaggaaatggatcgtgcccaggcagagctcaatgccttgaaacgaacagaagaagacctgaaaaagggtcaccagaaactggaagagatggttacccgtttagatcaagaagtagccgaggttgataaaaacatagaacttttgaaaaagaaggatgaagaactcagttctgctctggaaaaaatggaaaatcagtctgaaaacaatgatatcgatgaagttatcattcccacagctcccttatacaaacagatcctgaatctgtatgcagaagaaaacgctattgaagacactatcttttacttgggagaagccttgagaaggggcgtgatagacctggatgtcttcctgaagcatgtacgtcttctgtcccgtaaacagttccagctgagggcactaatgcaaaaagcaagaaagactgccggtctcagtgacctctactgacttctctgataccagctggaggttgagctcttcttaaagtattcttctcttccttttatcagtaggtgcccagaataagttattgcagtttatcattcaagtgtaaaatattttgaatcaataatatattttctgttttcttttggtaaagactggcttttattaatgcactttctatcctctgtaaactttttgtgctgaatgttgggactgctaaataaaatttgttgcataaaaaaaaaaaaaaaaaa

SEQ ID NO: 324 - DNA, 308 bp, Artificial Sequence
  Description of Artificial sequences:primer
  misc_feature (1)..(308): 3' terminal sequence from clone image:195013. succinate dehydrogenase complex, subunit d, integral membrane protein(SDHD) gene.
  misc_feature (8)..(8): n is a, c, g, or t
  misc_feature (10)..(10): n is a, c, g, or t
  misc_feature (24)..(24): n is a, c, g, or t
  misc_feature (224)..(224): n is a, c, g, or t
  misc_feature (268)..(268): n is a, c, g, or t
  misc_feature (305)..(305): n is a, c, g, or t
ttttttantnatattatataacantttatttaaaaaaattattttcatagaatacattttcacattagagattcccattgtgcgaaaataacaatttattacttatagttttatatttgtggacagattgttttagaacaagtagaatacatttgggaattaaatctcaatttacagttggtagtattttgatacatctacggggaaacttgcccttaaatggnacttctgtatattcagaagcactacaagcgtttcttcctagggntttagaaatttataatatgaggctatcagcatttccnaat

SEQ ID NO: 325 - DNA, 521 bp, Artificial Sequence
  Description of Artificial sequences:primer
  misc_feature (1)..(521): 5' terminal sequence from clone image:195013. succinate dehydrogenase complex, subunit d, integral membrane protein(SDHD) gene.
  misc_feature (319)..(319): n is a, c, g, or t
  misc_feature (464)..(464): n is a, c, g, or t
  misc_feature (514)..(514): n is a, c, g, or t
  misc_feature (521)..(521): n is a, c, g, or t
gcggttctctggaggctgagtgccgtttgcggtgccctaggaggccgagctctgttgcttcgaactccagtggtcagacctgctcatatctcagcatttcttcaggaccgacctatcccagaatggtgtggagtgcagcacatacacttgtcaccgagccaccattctggctccaaggctgcatctctccactggactagcgagagggttgtcagtgttttgctcctgggtctgcttccggctgcttatttgaatccttgctctgcgatggactattccctggctgcagccctcactcttcatggtcactggggccttngacaagttgttactgactatgttcatggggatgccttgcagaaagctgccaaggcagggcttttggcactttcagctttaaaccttgctgggctttgttatttcaactatcacgatgtggggcatctgcaaagctgttgccatgntgtggaagctctgaccttttgaattcatactttgaagatttgatgtatgnctctttn

SEQ ID NO: 326 - DNA, 1313 bp, Artificial Sequence
  Description of Artificial sequences:primer
  misc_feature (1)..(1313): succinate dehydrogenase complex, subunit d, integral membrane protein(SDHD) gene.
ccaggaacgagatggcggttctctggaggctgagtgccgtttgcggtgccctaggaggccgagctctgttgcttcgaactccagtggtcagacctgctcatatctcagcatttcttcaggaccgacctatcccagaatggtgtggagtgcagcacatacacttgtcaccgagccaccattctggctccaaggctgcatctctccactggactagcgagagggttgtcagtgttttgctcctgggtctgcttccggctgcttatttgaatccttgctctgcgatggactattccctggctgcagccctcactcttcatggtcactggggccttggacaagttgttactgactatgttcatggggatgccttgcagaaagctgccaaggcagggcttttggcactttcagctttaacctttgctgggctttgctatttcaactatcacgatgtgggcatctgcaaagctgttgccatgctgtggaagctctgacctttttgacttcatactttgaagaattgatgtatgcctctttgcctctgctttgtcatgccattaagctcacaataaggaagaaataacagataagtccattggtggacagccttcttctcttaatcacaagattattttcagaatttaatctttgaggaaaaggtttgagaggaattatatctaagttgtgagactgagttctatattctggtgagttaatggggttgcctcccagcttcttataagactcacagtataactaaacatgatatatcagcttttgcctttcaatttatcaatctcttaaagagaatccaactttattacgattagtatatgatcaaacttccatatttgccttgggaataatggacaaagggaaatactcttaattcatgaataaaaactttgcagaaaattagacagtgtttaattttcgaaaacttccctctctagacagtagataccacctactgatggttacatatactagggaaattttaaaattaggaaatgctgatagctcatattataaatttctaaatcctaggaagaaacgcttggagtgcttctgaatatacagaagttccatttaagggcaagtttccccgtagatgtatcaaaatactaccaactgtaaattgagatttaattcccaaatgtattctacttgttctaaaacaatctgtccacaaatataaaactataagtaataaattgttattttcgcacaatgggaatctctaatgtgaaaatgtattctatgaaaataattttttaaataaaatgttatataataaaagtgtcttctatgctttt

SEQ ID NO: 327 - DNA, 317 bp, Artificial Sequence
  Description of Artificial sequences:primer
  misc_feature (1)..(317): 3' terminal sequence from clone image:195702. death associated protein 3(DAP3) gene.
  misc_feature (105)..(105): n is a, c, g, or t
  misc_feature (299)..(299): n is a, c, g, or t
  misc_feature (305)..(305): n is a, c, g, or t
atctaacacaacactttagaaagatattttattttttaggaaaagagccataattatcttaaatgtgaaaaaccacatccaataaactgatataaagttttaggnacaagggaatatcttattgtcacgcattcacagtgaaacccattttaatgcaggtccagagccaactgcagtcctgtccaatcccatagggtacaagggcctgggctcctcttcctgtgtactgcccgacttcctcatcttactggggtccagcataaagcaggatgtccactgtcttcctcacatgctgtgancttggncttaggaggtag

SEQ ID NO: 328 - DNA, 358 bp, Artificial Sequence
  Description of Artificial sequences:primer
  misc_feature (1)..(358): 5' terminal sequence from clone image:195702. death associated protein 3(DAP3) gene.
  misc_feature (170)..(170): n is a, c, g, or t
  misc_feature (277)..(277): n is a, c, g, or t
  misc_feature (296)..(296): n is a, c, g, or t
  misc_feature (303)..(303): n is a, c, g, or t
  misc_feature (345)..(345): n is a, c, g, or t
  misc_feature (353)..(353): n is a, c, g, or t
aggacgggcgctttggagccggccccaggcagcgtgtgtcggtcgcctagtctggagaactagtcctcgactcacgtgcaaggatgatgctgaaaggaataacaaggcttatctctaggatccataagttggaccctgggcgttttttacacatggggacccaggctcgncaaagcattgctgctcacctagataacccaggttcccagttgagagtcccgagagctattttcccgcaaccaatgagaatgaccccggcccaagcatgggggatcancaaggagggtcaagcaatnacaacanttttccccccaggattttgggagaattgtaattttccccatnggcctttncttcc

SEQ ID NO: 329 - DNA, 1650 bp, Artificial Sequence
  Description of Artificial sequences:primer
  misc_feature (1)..(1650): death associated protein 3(DAP3) gene.
gccttttttgcagtctcaggacgggcgctttggagccggccccaggcagcgtgtgtcggtcgcctagtctggagaactagtcctcgactcacggtgagggaatggaccgacacgggtattgtaccgctgagggaaaggagcgggactccggacctccaggagtgcaaggatgatgctgaaaggaataacaaggcttatctctaggatccataagttggaccctgggcgttttttacacatggggacccaggctcgccaaagcattgctgctcacctagataaccaggttccagttgagagtccgagagctatttcccgcaccaatgagaatgacccggccaagcatggggatcagcacgagggtcagcactacaacatctccccccaggatttggagactgtatttccccatggccttcctcctcgctttgtgatgcaggtgaagacattcagtgaagcttgcctgatggtaaggaaaccagccctagaacttctgcattacctgaaaaacaccagttttgcttatccagctatacgatatcttctgtatggagagaagggaacaggaaaaaccctaagtctttgccatgttattcatttctgtgcaaaacaggactggctgatactacatattccagatgctcatctttgggtgaaaaattgtcgggatcttctgcagtccagctacaacaaacagcgctttgatcaacctttagaggcttcaacctggctgaagaatttcaaaactacaaatgagcgcttcctgaaccagataaaagttcaagagaagtatgtctggaataagagagaaagcactgagaaagggagtcctctgggagaagtggttgaacagggcataacacgggtgaggaacgccacagatgcagttggaattgtgctgaaagagctaaagaggcaaagttctttgggtatgtttcacctcctagtggccgtggatggaatcaatgctctttggggaagaaccactctgaaaagagaagataaaagcccgattgcccccgaggaattagcacttgttcacaacttgaggaaaatgatgaaaaatgattggcatggaggcgccattgtgtcggctttgagccagactgggtctctctttaagccccggaaagcctatctgccccaggagttgctgggaaaggaaggatttgatgccctggatccctttattcccatcctggtttccaactataacccaaaggaatttgaaagttgtattcagtattatttggaaaacaattggcttcaacatgagaaagctcctacagaagaagggaaaaaagagctgctgttcctaagtaacgcgaacccctcgctgctggagcggcactgtgcctacctctaagccaagatcacagcatgtgaggaagacagtggacatctgctttatgctggacccagtaagatgaggaagtcgggcagtacacaggaagaggagccaggcccttgtacctatgggattggacaggactgcagttggctctggacctgcattaaaatgggtttcactgtgaatgcgtgacaataagatattcccttgttcctaaaactttatatcagtttattggatgtggtttttcacatttaagataattatggctcttttcctaaaaaataaaatatctttct

SEQ ID NO: 330 - DNA, 394 bp, Artificial Sequence
  Description of Artificial sequences:primer
  misc_feature (1)..(394): 3' terminal sequence from clone image:195889. basic transcription factor 3(BTF3) gene.
  misc_feature (20)..(20): n is a, c, g, or t
  misc_feature (27)..(27): n is a, c, g, or t
  misc_feature (30)..(30): n is a, c, g, or t
  misc_feature (79)..(79): n is a, c, g, or t
  misc_feature (243)..(243): n is a, c, g, or t
  misc_feature (268)..(268): n is a, c, g, or t
  misc_feature (326)..(326): n is a, c, g, or t
  misc_feature (369)..(369): n is a, c, g, or t
  misc_feature (382)..(382): n is a, c, g, or t
cccgcgtgtgtgcgcctaanctcaggnggnccacccgagaccccttgagcaccaaccctagtcccccgcgcggcccctnattcgctccgacaagatgaaagaaacaatcatgaaccagggaaaactcgccaaactgcaggcacaagtgcgcattggtgggaaaggaactgctcgcagaaagaagaaggtggttcatagaacagccacagcagatgacaaaaaacttcagttctccttaaagangttaggggtaaacaatatctctggnattgaagaggtgaatatgtttacaaaccagggaacagtgatccactttaacaaccctnaagttcagggcatctctgggcagcggacactttcaccattacnggccttgctgagncaaagcagctgg

SEQ ID NO: 331 - DNA, 895 bp, Artificial Sequence
  Description of Artificial sequences:primer
  misc_feature (1)..(895): basic transcription factor 3(BTF3) gene.
gccatcttgcgtccccgcgtgtgtgcgcctaatctcaggtggtccacccgagaccccttgagcaccaaccctagtcccccgcgcggccccttattcgctccgacaagatgaaagaaacaatcatgaaccaggaaaaactcgccaaactgcaggcacaagtgcgcattggtgggaaaggaactgctcgcagaaagaagaaggtggttcatagaacagccacagcagatgacaaaaaacttcagttctccttaaagaagttaggggtaaacaatatctctggtattgaagaggtgaatatgtttacaaaccaaggaacagtgatccactttaacaaccctaaagttcaggcatctctggcagcgaacactttcaccattacaggccatgctgagacaaagcagctgacagaaatgctacccagcatcttaaaccagcttggtgcggatagtctgactagtttaaggagactggccgaagctctgcccaaacaatctgtggatggaaaagcaccacttgctactggagaggatgatgatgatgaagttccagatcttgtggagaattttgatgaggcttccaagaatgaggcaaactgaattgagtcaacttctgaagataaaacctgaagaagttactgggagctgctattttatattatgactgctttttaagaaatttttgtttatggatctgataaaatctagatctctaatatttttaagcccaagccccttggacactgcagctcttttcagtttttgcttatacacaattcattctttgcagctaattaagccgaagaagcctgggaatcaagtttgaaacaaagattaataaagttctttgcctagtaaaaaaaaaaaaaaaaaaaaaaataaaaaaaaaaaaaaaaaaa

SEQ ID NO: 332 - DNA, 190 bp, Artificial Sequence
  Description of Artificial sequences:primer
  misc_feature (1)..(190): 3' terminal sequence from clone image:198903. bub3 budding uninhibited by benzimidazoles 3 homolog (yeast)(BUB3) gene.
  misc_feature (1)..(1): n is a, c, g, or t
  misc_feature (3)..(6): n is a, c, g, or t
  misc_feature (9)..(9): n is a, c, g, or t
  misc_feature (11)..(11): n is a, c, g, or t
  misc_feature (20)..(20): n is a, c, g, or t
  misc_feature (28)..(28): n is a, c, g, or t
  misc_feature (39)..(39): n is a, c, g, or t
  misc_feature (41)..(41): n is a, c, g, or t
  misc_feature (44)..(44): n is a, c, g, or t
  misc_feature (74)..(74): n is a, c, g, or t
  misc_feature (81)..(81): n is a, c, g, or t
  misc_feature (83)..(83): n is a, c, g, or t
ncnnnnggntnttaatattngaagggtnctgcatctcgntnatnagcacagaaataacaggtttagagtatatnacaaaangngctcaaactgttcagatacagcaactgggcttactaggggacagaaggggaaatacgtcagactactgtacagggacacaaagactcctcatcctaaacaaagtatt

SEQ ID NO: 333 - DNA, 439 bp, Artificial Sequence
  Description of Artificial sequences:primer
  misc_feature (1)..(439): 5' terminal sequence from clone image:198903. bub3 budding uninhibited by benzimidazoles 3 homolog (yeast)(BUB3) gene.
  misc_feature (360)..(360): n is a, c, g, or t
  misc_feature (367)..(367): n is a, c, g, or t
  misc_feature (379)..(379): n is a, c, g, or t
  misc_feature (393)..(393): n is a, c, g, or t
  misc_feature (415)..(415): n is a, c, g, or t
  misc_feature (428)..(428): n is a, c, g, or t
tgggacttacggaacatgggttacgtgcagcagcgcagggagtccagcctgaaataccagactcgctgcatacgagcgtttccaaacaagcagggttatgtattaagctctattgaaggccgagtggcagttgagtatttggacccaagccctgaggtacagaagaagaagtatgccttcaaatgtcacagactaaaagaaaataatattgagcagatttacccagtcaatgccatttcttttcacaatatccacaatacatttgccacaggtggttctgatggctttgtaaatatttgggatccatttaacaaaaagcgactgtgccaattccatcggtaccccacgagcattcgcatncacttgncttcagtaattnatggggactacggntttgcaattaggcgttcatccntattttgtattgnatttgggtgga

SEQ ID NO: 334 - DNA, 2619 bp, Artificial Sequence
  Description of Artificial sequences:primer
  misc_feature (1)..(2619): bub3 budding uninhibited by benzimidazoles 3 homolog (yeast)(BUB3) gene.
gaagcaaggaggcggcggcggccgagcgagtggcgagtagtggaaacgttgcttctgaggggagcccaagatgaccggttctaacgagttcaagctgaaccagccacccgaggatggcatctcctccgtgaagttcagccccaacacctcccagttcctgcttgtctcctcctgggacacgtccgtgcgtctctacgatgtgccggccaactccatgcggctcaagtaccagcacaccggcgccgtcctggactgcgccttctacgatccaacgcatgcctggagtggaggactagatcatcaattgaaaatgcatgatttgaacactgatcaagaaaatcttgttgggacccatgatgcccctatcagatgtgttgaatactgtccagaagtgaatgtgatggtcactggaagttgggatcagacagttaaactgtgggatcccagaactccttgtaatgctgggaccttctctcagcctgaaaaggtatataccctctcagtgtctggagaccggctgattgtgggaacagcaggccgcagagtgttggtgtgggacttacggaacatgggttacgtgcagcagcgcagggagtccagcctgaaataccagactcgctgcatacgagcgtttccaaacaagcagggttatgtattaagctctattgaaggccgagtggcagttgagtatttggacccaagccctgaggtacagaagaagaagtatgccttcaaatgtcacagactaaaagaaaataatattgagcagatttacccagtcaatgccatttcttttcacaatatccacaatacatttgccacaggtggttctgatggctttgtaaatatttgggatccatttaacaaaaagcgactgtgccaattccatcggtaccccacgagcatcgcatcacttgccttcagtaatgatgggactacgcttgcaatagcgtcatcatatatgtatgaaatggatgacacagaacatcctgaagatggtatcttcattcgccaagtgacagatgcagaaacaaaacccaagtcaccatgtacttgacaagatttcatttacttaagtgccatgttgatgataataaaacaattcgtactccccaatggtggatttattactattaaagaaaccagggaaaatattaattttaatattataacaacctgaaaataatggaaaagaggtttttgaatttttttttttaaataaacaccttcttaagtgcatgagatggtttgatggtttgctgcattaaaggtatttgggcaaacaaaattggagggcaagtgactgcagttttgagaatcagttttgaccttgatgattttttgtttccactgtggaaataaatgtttgtaaataagtgtaataaaaatccctttgcattctttctggaccttaaatggtagaggaaaaggctcgtgagccatttgtttcttttgctggttatagttgctaattctaaagctgcttcagactgcttcatgaggaggttaatctacaattaaacaatatttcctcttggccgtccattattttctgaagcagatggttcatcatttcctgggctgttaaacaaagcgaggttaaggttagactcttgggaatcagctagttttcaatcttattagggtgcagaaggaaaactaataagaaaacctcctaatatcattttgtgactgtaaacaattatttattagcaaacaattgatcccagaagggcaaattgtttgagtcagtaatgagctgagaaaagacagagcatatctgtgtatttggaaaaataattgtaacgtaattgcagtgcatttagacaggcatctatttggacctgtttctatctctaaatgaatttttggaaacattaatgaggtttacatatttctctgacatttatatagttcttatgtccatttcagttgaccagccgctggtgattaaagttaaaaagaaaaaaattatagtgagaatgagattcatttcaatgtaatgcactaaagcagaacacgaacttagcttggcctattctaggtagttccaaatagtatttttgttgtcaaactttaaaatttatattaatttgcaaatgtatgtctctgagtaggacttggacctttcctgagatttattttatccgtgatgtattttttttaattcttttgatacagagaagggtctttttttttttaagtatttcagtgaaaacttggtgtaagtctgaacccatcttttgaaatgtattttcttcattgcaggtccacctaatcatcctgtgaaagtggtttctctatggaaagctttgtttgcttcctacaaatacatgcttattccttaagggatgtgttagagttactgtggatttctctgttttctgtcttacaagaaacttgtctatgtaccttaatactttgtttaggatgaggagtctttgtgtccctgtacagtagtctgacgtatttccccttctgtcccctagtaagcccagttgctgtatctgaacagtttgagctctttttgtaatatactctaaacctgttatttctgtgctaataaacgagatgcagaacccttgaaaaaaaaaaaaaaaaaaaaaaaaaaaaaaaaaa

SEQ ID NO: 335 - DNA, 156 bp, Artificial Sequence
  Description of Artificial sequences:primer
  misc_feature (1)..(156): 3' terminal sequence from clone image:199837. Has strong similarity to protein sp:p08865 rsp4_human 40s ribosomal protein sa (p40) (colon carcinoma laminin-binding protein) (nem/1chd4).
atgctgcttaagagcctatgcaagaacagcttaagaccagtcagtggttgctcctacccattcagtggcctgagcagtgggagctgcagaccagtcttccgtggcaggctgagcgctccagtcttcagtagggaattgctgaataggcacagaggg

SEQ ID NO: 336 - DNA, 493 bp, Artificial Sequence
  Description of Artificial sequences:primer
  misc_feature (1)..(493): 3' terminal sequence from clone image:200521. 2',5'-oligoadenylate synthetase 1, 40/46kda(OAS1) gene.
  misc_feature (17)..(17): n is a, c, g, or t
  misc_feature (23)..(23): n is a, c, g, or t
  misc_feature (59)..(59): n is a, c, g, or t
  misc_feature (389)..(389): n is a, c, g, or t
  misc_feature (407)..(407): n is a, c, g, or t
  misc_feature (419)..(419): n is a, c, g, or t
gtatttgctttattttnattgtnattgataatacattagacattaccctcccatcaggngcacagaagaaagtcaaggctggaatttcattctcttatctaaatctctctgttctctctcagggaatattttcagagaataggtggaatgaagtgaggctgtggagaatgttatctatgataggatagagggcatagaaggccaggagtcaggagacctgggttctgtcctggattatacaccagctcactgaggagctttgtcttctctggatcaagagtcccacctgaaaatgaaggaactgggtccagataacactgggagccctttcccccaagatgcactgggcatttcagaggatgggtgcaggtccagtccttttctggccngtgggggtgggaagccgntgggagtttgcngggtctattgagagaaatgagggtacccaagtgttccaatgtaacctatttctgaaacgtccggggtcctcggt

SEQ ID NO: 337 - DNA, 406 bp, Artificial Sequence
  Description of Artificial sequences:primer
  misc_feature (1)..(406): 5' terminal sequence from clone image:200521. 2',5'-oligoadenylate synthetase 1, 40/46kda(OAS1) gene.
  misc_feature (318)..(318): n is a, c, g, or t
  misc_feature (324)..(324): n is a, c, g, or t
  misc_feature (342)..(342): n is a, c, g, or t
  misc_feature (353)..(353): n is a, c, g, or t
  misc_feature (367)..(367): n is a, c, g, or t
  misc_feature (379)..(379): n is a, c, g, or t
  misc_feature (400)..(400): n is a, c, g, or t
aagctcaagagcctcatccgcctagtcaagcactggtaccaaaattgtaagaagaagcttgggaagctgccacctcagtatgccctggagctcctgacggtctatgcttgggagcgagggagcatgaaaacacatttcaacacagcccagggatttcggacggtcttggaattagtcataaactaccagcaactctgcatctactggacaaagtattatgactttaaaaaccccattattgaaaagtacctgagaaggcagctcacgaaacccaggcctgtgatcctggacccggcggaccctacaggaaactttggngtagtnggagacccaaagggtttnggaggcagctngcacaagagggctnaggtctgggctnaattacccattgcttttaaanatttgg

SEQ ID NO: 338 - DNA, 1590 bp, Artificial Sequence
  Description of Artificial sequences:primer
  misc_feature (1)..(1590): 2',5'-oligoadenylate synthetase 1, 40/46kda(OAS1) gene.
gaggcagttctgttgccactctctctcctgtcaatgatggatctcagaaataccccagccaaatctctggacaagttcattgaagactatctcttgccagacacgtgtttccgcatgcaaatcgaccatgccattgacatcatctgtgggttcctgaaggaaaggtgcttccgaggtagctcctaccctgtgtgtgtgtccaaggtggtaaagggtggctcctcaggcaagggcaccaccctcagaggccgatctgacgctgacctggttgtcttcctcagtcctctcaccacttttcaggatcagttaaatcgccggggagagttcatccaggaaattaggagacagctggaagcctgtcaaagagagagagcactttccgtgaagtttgaggtccaggctccacgctggggcaacccccgtgcgctcagcttcgtactgagttcgctccagctcggggagggggtggagttcgatgtgctgcctgcctttgatgccctgggtcagttgactggcagctataaacctaacccccaaatctatgtcaagctcatcgaggagtgcaccgacctgcagaaagagggcgagttctccacctgcttcacagaactacagagagacttcctgaagcagcgccccaccaagctcaagagcctcatccgcctagtcaagcactggtaccaaaattgtaagaagaagcttgggaagctgccacctcagtatgccctggagctcctgacggtctatgcttgggagcgagggagcatgaaaacacatttcaacacagcccaaggatttcggacggtcttggaattagtcataaactaccagcaactctgcatctactggacaaagtattatgactttaaaaaccccattattgaaaagtacctgagaaggcagctcacgaaacccaggcctgtgatcctggacccggcggaccctacaggaaacttgggtggtggagacccaaagggttggaggcagctggcacaagaggctgaggcctggctgaattacccatgctttaagaattgggatgggtccccagtgagctcctggattctgctggctgaaagcaacagtacagacgatgagaccgacgatcccaggacgtatcagaaatatggttacattggaacacatgagtaccctcatttctctcatagacccagcacgctccaggcagcatccaccccacaggcagaagaggactggacctgcaccatcctctgaatgccagtgcatcttgggggaaagggctccagtgttatctggaccagttccttcattttcaggtgggactcttgatccagagaagacaaagctcctcagtgagctggtgtataatccaagacagaacccaagtctcctgactcctggccttctatgccctctatcctatcatagataacattctccacagcctcacttcattccacctattctctgaaaatattccctgagagagaacagagagatttagataagagaatgaaattccagccttgactttcttctgtgcacctgatgggagggtaatgtctaatgtattatcaataacaataaaaataaagcaaataccaaaaa

SEQ ID NO: 339 - DNA, 389 bp, Artificial Sequence
  Description of Artificial sequences:primer
  misc_feature (1)..(389): 3' terminal sequence from clone image:200714. cd209 antigen-like(CD209L) gene.
  misc_feature (1)..(1): n is a, c, g, or t
  misc_feature (155)..(155): n is a, c, g, or t
  misc_feature (169)..(169): n is a, c, g, or t
  misc_feature (234)..(234): n is a, c, g, or t
  misc_feature (248)..(248): n is a, c, g, or t
  misc_feature (329)..(329): n is a, c, g, or t
ntttgtagttacaacatttaccactttattataaaggctacaactcagaaacagccaaatggaagacatgtataggacaaagaaagatgtgggggtggaagaggttgtatggagcctccatgccctctctggatgccattggttgactggggganttaattccctgggngcttccagcctgcaagatgagctccttcaaccagcaagtccccagtcaaaagggtgcacggggtntagctgggaagttnagcagatgggtagtttgcatgggatgagataaagccccaggggacaggggcagctacacatgaatccaaatagtcttaatntcccaaagggacagagagtgggtttcatacaacatacccaggcccgccccctaaattgca

SEQ ID NO: 340 - DNA, 503 bp, Artificial Sequence
  Description of Artificial sequences:primer
  misc_feature (1)..(503): 5' terminal sequence from clone image:200714. cd209 antigen-like(CD209L) gene.
  misc_feature (1)..(1): n is a, c, g, or t
  misc_feature (13)..(13): n is a, c, g, or t
  misc_feature (388)..(388): n is a, c, g, or t
  misc_feature (420)..(420): n is a, c, g, or t
  misc_feature (433)..(433): n is a, c, g, or t
  misc_feature (465)..(465): n is a, c, g, or t
  misc_feature (490)..(490): n is a, c, g, or t
nttcggcacagtngggaatatggacaacctaatctgagcccagccctgaccagcctcccccaacagaacgcctgtgccgccactgtcccaaggactggacattcttccaaggaaactgttacttcatgtctaactcccagcggaactggcacgactccgtcaccgcctgccaggaagtgagggcccagctcgtcgtaatcaaaactgctgaggagcagaacttcctacagctgcagacttccaggagtaaccgcttctcctggatgggactttcagacctaaatcaggaaggcacgtggcaatgggtggacggctcacctctgtcacccagcttccagcggtactggaacagtggagaacccaacaatagcgggaatgaagactgtgncggaatttagtggcagtggctgggaacgacantcgatgtgacttnacatttactggatctgcaaaaagcccgcagcntgtttcagagacgattagttgtttnctggtagcttcat

SEQ ID NO: 341 - DNA, 1800 bp, Artificial Sequence
  Description of Artificial sequences:primer
  misc_feature (1)..(1800): cd209 antigen-like(CD209L) gene.
aataaaagctgtggtccccaggagtcctgaacatctggggacagcgggaaaacatgagtgactccaaggaaccaagggtgcagcagctgggcctcctggaagaagatccaacaaccagtggcatcagactttttccaagagactttcaattccagcagatacatggccacaagagctctacagggtgtcttggccatggcgccctggtgctgcaactcctctccttcatgctcttggctggggtcctggtggccatccttgtccaagtgtccaaggtccccagctccctaagtcaggaacaatccgagcaagacgcaatctaccagaacctgacccagcttaaagctgcagtgggtgagctctcagagaaatccaagctgcaggagatctaccaggagctgacccagctgaaggctgcagtgggtgagttgccagagaaatccaagctgcaggagatctaccaggagctgacccggctgaaggctgcagtgggtgagttgccagagaaatccaagctgcaggagatctaccaggagctgacccggctgaaggctgcagtgggtgagttgccagagaaatccaagctgcaggagatctaccaggagctgacggagctgaaggctgcagtgggtgagttgccagagaaatccaagctgcaggagatctaccaggagctgacccagctgaaggctgcagtgggtgagttgccagaccagtccaagcagcagcaaatctatcaagaactgaccgatttgaagactgcatttgaacgcctgtgccgccactgtcccaaggactggacattcttccaaggaaactgttacttcatgtctaactcccagcggaactggcacgactccgtcaccgcctgccaggaagtgagggcccagctcgtcgtaatcaaaactgctgaggagcagaacttcctacagctgcagacttccaggagtaaccgcttctcctggatgggactttcagacctaaatcaggaaggcacgtggcaatgggtggacggctcacctctgtcacccagcttccagcggtactggaacagtggagaacccaacaatagcgggaatgaagactgtgcggaatttagtggcagtggctggaacgacaatcgatgtgacgttgacaattactggatctgcaaaaagcccgcagcctgcttcagagacgaatagttgtttccctgctagcctcagcctccattgtggtatagcagaacttcacccacttgtaagccagcgcttcttctctccatccttggaccttcacaaatgccctgagacggttctctgttcgatttttcatcccctatgaacctgggtcttattctgtccttctgatgcctccaagtttccctggtgtagagcttgtgttcttggcccatccttggagctttataagtgacctgagtgggatgcatttagggggcgggcttggtatgttgtatgaatccactctctgttccttttggagattagactatttggattcatgtgtagctgccctgtcccctggggctttatctcatccatgcaaactaccatctgctcaacttccagctacaccccgtgcacccttttgactggggacttgctggttgaaggagctcatcttgcaggctggaagcaccagggaattaattcccccagtcaaccaatggcatccagagagggcatggaggctccatacaacctcttccacccccacatctttctttgtcctatacatgtcttccatttggctgtttctgagttgtagcctttataataaagtggtaaatgttgtaactgc

SEQ ID NO: 342 - DNA, 463 bp, Artificial Sequence
  Description of Artificial sequences:primer
  misc_feature (1)..(463): 3' terminal sequence from clone image:201352. fibrinogen, b beta polypeptide(FGB) gene.
  misc_feature (27)..(30): n is a, c, g, or t
  misc_feature (33)..(33): n is a, c, g, or t
  misc_feature (458)..(458): n is a, c, g, or t
ttaattaaaaaacattcattgttggannnntantattaggcagttaagaggagtttcctgacaaaaatgtggaagctaaagataagggaagaaaggcagtttttagtttcccaaaattttatttttggtgagattttattttgtttttcttttaggtgaatattggcttggaaatgataaaattagccagcttaccaggatgggacccacagaacttttgatagaaatggaggactggaaaggagacaaagtaaaggctcactatggaggattcactgtacagaatgaagccaacaaataccagatctcagtgaacaaatacagaggaacagccggtaatgccctcatgggatgggagcatctcagctgatggggagaaaacaggaccctgacccttcacaacggcatgtttcttccagcacgtattgaccaggggaccattgacggctgggtatgtnttggc

SEQ ID NO: 343 - DNA, 1918 bp, Artificial Sequence
  Description of Artificial sequences:primer
  misc_feature (1)..(1918): fibrinogen, b beta polypeptide(FGB) gene.
aagtctacatgaaaaggatggtttcttggagcttccacaaacttaaaaccatgaaacatctattattgctactattgtgtgtttttctagttaagtcccaaggtgtcaacgacaatgaggagggtttcttcagtgcccgtggtcatcgaccccttgacaagaagagagaagaggctcccagcctgaggcctgccccaccgcccatcagtggaggtggctatcgggctcgtccagccaaagcagctgccactcaaaagaaagtagaaagaaaagcccctgatgctggaggctgtcttcacgctgacccagacctgggggtgttgtgtcctacaggatgtcagttgcaagaggctttgctacaacaggaaaggccaatcagaaatagtgttgatgagttaaataacaatgtggaagctgtttcccagacctcctcttcttcctttcagtacatgtatttgctgaaagacctgtggcaaaagaggcagaagcaagtaaaagataatgaaaatgtagtcaatgagtactcctcagaactggaaaagcaccaattatatatagatgagactgtgaatagcaatatcgcaactaaccttcgtgtgcttcgttcaatcctagaaaacctgagaagcaaaatacaaaagttagaatctgatgtctcagctcaaatggaatattgtcgcaccccatgcactgtcagttgcaatattcctgtggtgtctggcaaagaatgtgaggaaattatcaggaaaggaggtgaaacatctgaaatgtatctcattcaacctgacagttctgtcaaaccgtatagagtatactgtgacatgaatacagaaaatggaggatggacagtgattcagaaccgtcaagacggtagtgttgactttggcaggaaatgggatccatataaacagggatttggaaatgttgcaaccaacacagatgggaagaattactgtggcctaccaggtgaatattggcttggaaatgataaaattagccagcttaccaggatgggacccacagaacttttgatagaaatggaggactggaaaggagacaaagtaaaggctcactatggaggattcactgtacagaatgaagccaacaaataccagatctcagtgaacaaatacagaggaacagccggtaatgccctcatggatggagcatctcagctgatgggagaaaacaggaccatgaccattcacaacggcatgttcttcagcacgtatgacagagacaatgacggctggttaacatcagatcccagaaaacagtgttctaaagaagacggtggtggatggtggtataatagatgtcatgcagccaatccaaacggcagatactactggggtggacagtacacctgggacatggcaaagcatggcacagatgatggtgtagtatggatgaattggaaggggtcatggtactcaatgaggaagatgagtatgaagatcaggcccttcttcccacagcaatagtccccaatacgtagatttttgctcttctgtatgtgacaacatttttgtacattatgttattggaattttctttcatacattatattcctctaaaactctcaagcagacgtgagtgtgactttttgaaaaaagtataggataaattacattaaaatagcacatgattttcttttgttttcttcatttctcttgctcaccaagaagtaacaaaagtatagttttgacagagttggtgttcataatttcagttctagttgattgcgagaattttcaaataaggaagaggggtcttttatccttgtcgtaggaaaaccatgacggaaaggaaaaactgatgtttaaaagtccacttttaaaactatatttatttatgtaggatctgtcaaagaaaacttccaaaaagatttattaattaaaccagactctgttgcaat

SEQ ID NO: 344 - DNA, 412 bp, Artificial Sequence
  Description of Artificial sequences:primer
  misc_feature (1)..(412): 3' terminal sequence from clone image:201925. myosin, light polypeptide 1, alkali, skeletal, fast(MYL1) gene.
  misc_feature (372)..(372): n is a, c, g, or t
tcaatattttattcttctcatctagagcagcagacactttgtttgtgtggtatgaattcaattcagagaaaaactgaagatgtataaaaattcagggagttgctcagtcttgaaccgtccagattgctttgttttcctgaatgatggtaaacagatctggagagtttgtcatgggtgtgattaaaataagtttccagccagtcttcctaaacaatgcttgttcttgagagctccattcagatagacatgatgtgcttgacaaaagcttcgtaggttgatgcagccattgggagtcttcttgacctgccatcaggggcttccaattcttccctctttcatcttttcacccgggggtgggctaggaacagggcnggagttcaggcaccccatggactgtggcccttggccttcc

SEQ ID NO: 345 - DNA, 479 bp, Artificial Sequence
  Description of Artificial sequences:primer
  misc_feature (1)..(479): 5' terminal sequence from clone image:201925. myosin, light polypeptide 1, alkali, skeletal, fast(MYL1) gene.
  misc_feature (10)..(10): n is a, c, g, or t
  misc_feature (404)..(404): n is a, c, g, or t
  misc_feature (428)..(428): n is a, c, g, or t
  misc_feature (459)..(459): n is a, c, g, or t
atttcggcanagcaacccaaccaccactcctcttccaagaatcattttgacaggttcttttggaggaactccttctctttttaacccacccttttaaaaaaaaaaatggcaccaaagaaagacgtgaagaaacctgtggctgcggctgcggctgccccagccccggcaccggcacctgcacctgcccctgccccagccaaacccaaagaagaaaaaattgacctctctgccattaagatcgagttctctaaggaacagcaggatgaattcaaggaggcatttctcctgtttgacagaacaggtgattccaagatcaccttaagccagggtcggtgatgtccttcgagctctgggcacaaatcccaccaatgcagaggtcaggaaagttctggggaaaccccagncaatgaaggagctgaattgcccangaaaatttgaagttttgaacaatttgtggcntatggattgcaaggcctttt

SEQ ID NO: 346 - DNA, 1045 bp, Artificial Sequence
  Description of Artificial sequences:primer
  misc_feature (1)..(1045): myosin, light polypeptide 1, alkali skeletal, fast(MYL1) gene.
acactctgggtccatcttcaagacactgggctgtggatcaacccaaccaccatcctcttccaagaatcattttgacaggttcttttggaggaactccttctctttttaacccacccttttaaaaaaaaaaatggcaccaaagaaagacgtgaagaaacctgtggctgcggctgcggctgccccagccccggcaccggcacctgcacctgcccctgccccagccaaacccaaagaagaaaaaattgacctctctgccattaagatcgagttctctaaggaacagcaggatgaattcaaggaggcatttctcctgtttgacagaacaggtgattccaagatcaccttaagccaggtcggtgatgtccttcgagctctgggcacaaatcccaccaatgcagaggtcaggaaagttctgggaaaccccagcaatgaagagctgaatgccaagaaaattgagtttgaacaatttctgcctatgatgcaagccatttccaacaacaaggaccaggccacctatgaagactttgttgagggtctgcgtgtctttgacaaggaaggcaatggcacagtcatgggtgctgaactccgccatgttctagccaccctgggtgaaaagatgaaagaggaagaagtggaagccctgatggcaggtcaagaagactccaatggctgcatcaactacgaagcttttgtcaagcacatcatgtctatctgaatggagctctcaagaacaagcattgtttaggaagactggctggaaacttattttaatcacacccatgacaaactctccagatctgtttaccatcattcaggaaaacaaagcaatctggacggttcaagactgagcaactccctgaatttttatacatcttcagtttttctctgaattgaattcataccacacaaacaaagtgtctgctgctctagatgagaagaataaaatattgacaatctcaaatccaagcaccattctttattatctaccatgaatcaacgaaacattcttaaaacaataaatcaataaacaattttggtcagtctg

SEQ ID NO: 347 - DNA, 298 bp, Artificial Sequence
  Description of Artificial sequences:primer
  misc_feature (1)..(298): 3' terminal sequence from clone image:202609. prp4 pre-mrna processing factor 4 homolog b (yeast)(PRPF4B) gene.
  misc_feature (274)..(274): n is a, c, g, or t
  misc_feature (289)..(289): n is a, c, g, or t
gtatgatttagtactcagttaacaataaaataactattgcatgctgcatttaaaacacttaccctctctgttactttatcaacttctatgtacatgaagttgagattttgatcaaaatgctgatctttgaacacaccttttcgaatcatcttatttggcatctttcctttgagatccattgcaagcttcagcatatggttattggttttgccagggaataaaatttttccagtatagagttcgtataaggtgcaacctacagaccacatatctntaccattgtcatagncttttacct

SEQ ID NO: 348 - DNA, 316 bp, Artificial Sequence
  Description of Artificial sequences:primer
  misc_feature (1)..(316): 5' terminal sequence from clone image:202609. prp4 pre-mrna processing factor 4 homolog b (yeast)(PRPF4B) gene.
cttttcatagttaggaaattgaattaaaaataaatagaaaaggaatttttaaatgaatgtctttgttctcagtattggaattaataaaacttttcaaagccaataatttttatttatttgtattaattattcctgggcttgaattaaattcccttgaaaaaatgttttgcaggttaatgaatcccaaaactattttaaaagctttgcgatttttggggtcggcttcacatgttgcggataatgacataacaccttatcttgtcagtagattttatcgtgctcctgaaatcagtaaggttcctaatgttctttgacc

SEQ ID NO: 349 - DNA, 6681 bp, Artificial Sequence
  Description of Artificial sequences:primer
  misc_feature (1)..(6681): prp4 pre-mrna processing factor 4 homolog b (yeast)(PRPF4B) gene.
cttcccctaccctccaccgtccgggagccgccgccaccgccgccgaggagtcaggaagttcaagatggccgccgcggagacccagtcgctacgggagcagccagagatggaagatgctaattctgaaaagagtataaatgaagaaaatggagaagtatcagaagaccagtctcaaaataagcacagtcgtcacaaaaaaaagaagcataaacacagaagtaaacataagaaacataaacattcctcagaagaagacaaggataaaaaacataaacataagcataaacataagaaacacaaaagaaaagaggttattgatgcttctgataaagagggtatgtctccagcaaaaagaactaaacttgatgatttagctttgctagaagacttggaaaaacagagagccttgattaaggccgaacttgataatgagttaatggaaggaaaggtccagtctggtatggggctcattttgcaaggttatgagtctggctctgaagaagagggggaaattcatgaaaaggcaagaaatggaaataggtctagtactagatcttcaagtacaaaggggaaacttgaacttgtggacaataaaattactacaaagaaacgaagtaaaagcagatccaaagaacggactagacataggtctgataaaaagaaaagtaaggggggtattgaaatcgttaaagagaaaacaactaggagcaagtcaaaggagaggaaaaaatctaaaagcccatccaaaagaagtaagtctcaagatcaagcaaggaaatcaaaatcccctacccttagaaggcgatctcaagagaaaattggtaaggccagatctcctactgatgataaggttaaaattgaagataaaagtaaatcaaaagataggaaaaaatccccaattataaatgaaagtagaagtcgcgatcgaggtaaaaaatccagatccccagttgatttaagaggtaaatccaaagacagaaggtcacggtccaaagagagaaaatcaaaacggtctgaaactgataaagaaaagaagccaattaaatctccctctaaagatgcttcatctgggaaagaaaataggtcacccagcagaagacctggtcgtagtcctaaaagaagaagtttgtctccaaaaccacgtgataaatcaagaagaagcaggtctccacttttgaatgatagaagatctaagcagagcaaatccccctcgcggacactgtctcctgggagaagagccaagagccgatccttagaaagaaaacgacgagaaccagagaggagacgactttcttctccaagaacacgacctcgagatgatatcctcagtagacgtgaaagatcaaaagatgccagccccatcaatagatggtctccaacccgaagaagaagtagatctcccattagaaggaggtctcgttccccactcagacgtagcaggtctccaagaagaagaagcagatctcctcggagaagggacagaggtcggaggagcagatcacgcttgcgaaggcggtctcgatcacgcggtggtcgtagacgaaggagcagaagcaaagtaaaggaagataaatttaaaggaagtctttctgaaggaatgaaagttgagcaggaatcttcgtctgatgataaccttgaagactttgatgtagaggaagaagatgaagaagccctaatagaacagagaagaatccaaaggcaggcaattgttcagaaatataaataccttgctgaagatagcaacatgtctgtgccatctgaaccaagcagcccccagagcagtacgagaacacgatcaccatctccagatgacattctggagcgagtagctgctgatgttaaagagtatgaacgggaaaatgttgatacatttgaggcctcagtgaaagccaagcataatctaatgacagttgaacagaataatggttcatctcagaagaagttgttggcacctgatatgtttacagaatctgatgatatgtttgctgcgtattttgatagtgctcgtcttcgggccgctggcattggaaaagatttcaaagagaatcccaacctcagagataactggaccgatgcagaaggctattatcgtgtgaacataggtgaagtcctagataaacgttacaatgtgtatggctacactgggcaaggtgtattcagtaatgttgtacgagccagagataatgcaagagccaaccaagaagtggctgtaaagatcatcagaaacaatgagctcatgcaaaagactggtttaaaagaattagagttcttgaaaaaacttaatgatgctgatcctgatgacaaatttcattgtctgagactcttcaggcacttctatcacaagcagcatctttgtctggtattcgagcctctcagcatgaacttacgagaggtgttaaaaaaatatggtaaagatgttggtcttcatattaaagctgtaagatcctatagtcagcagttgttcctggcattgaaactccttaaaagatgcaatatcctacatgcagatatcaagccagacaatatcctggttaatgaatccaaaactattttaaagctttgcgattttgggtcggcttcacatgttgcggataatgacataacaccttatcttgtcagtagattttatcgtgctcctgaaatcattataggtaaaagctatgactatggtatagatatgtggtctgtaggttgcaccttatacgaactctatactggaaaaattttattccctggcaaaaccaataaccatatgctgaagcttgcaatggatctcaaaggaaagatgccaaataagatgattcgaaaaggtgtgttcaaagatcagcattttgatcaaaatctcaacttcatgtacatagaagttgataaagtaacagagagggagaaagttactgttatgagcaccattaatccaactaaggacctgttggctgacttgattgggtgccagagacttcctgaagaccaacgtaagaaagtacaccagctaaaggacttgttggaccagattctgatgttggacccagctaaacgaattagcatcaaccaggccctacagcacgccttcatccaggaaaaaatttaaacaagatgaagaaactccaagggtttgagtaaatacaaagactgaagaaatttcacagcagtttattaatgtatataaacttataaatatttctccagcaaatttgaggaagcatgatatatttgaattaacaccaagggtgatatttcttttagagatgttagttaatctgttttgtgtcttacgtgaaatttcactgtagactgttttaaattgccaagactgcacaaaattacagtgctaatgtatatggttgcagttcacataaagacaaaagcatctgttatgaaatgagtagtaatattgggtggttgatttgttcttagcagacttggcttcattttggtcttgagataaaatggccagcataaatgctgtttatattcacgttttcctaggtgtgtgtgtgcaggccacagcagcatgcccttggtgtagtcagtgccgaaaggggtctgttccttcttgagcctgcctgcagggatggtctccttttaaagcaggttgtgtgcagcattcagtacactgaaggtaagctaaaccatcaacatctctggtgttttaagatgttattttattggaacaactgacaaatgagggatgttagctttgtggcagaattccctgcatgtgtgataactgatcttgttttattttttggcattgcaactgtggcatagttacaatttctgtttgttcatcacatttaaaattggaagagaacgcgcttgatggatagagcgccttcagtgtactgtttcttattaactttactttttttaaatcaacttgctatagactttatatacattttgttaaatatagttcctagtgacatagaaacgatgcgtagttttcatttactaattacaaatgttgaggcctaattctgaaagtcctcatatttaaaggctagacaacgtaatgaaatttttaactatttgtatgtcattttgaaagtgtactgctttatggtaaaagtgtttttcatttgttcattgttttcattatttgtgatcatgttgtctttcaatacaggcataaaccttccactcttgaacaaagcagctgctttttaaaagcggtaattgcttctttaccttttatttcttttgtaaatgaagcttttctttaagaatgtgactttaaagtgttgtctattgcataaaacagttgacactcacttattgtaaagtgaagattgttctactgcatgtgaagtggaccatgcagatttctgtatgttctcagtatgcatcactagataataaagtcttttgtgaacaaggcatttgtagccatttttaaaagtttttgtcttcagtgctggtaagtcaggtaaaccataaatagttaaaagcaaccttttgtttttttcctgaaagtttttaattgaaagtattattagttaaagatgtaaacctagccaaaattaccagtttattaataattaggatcctaattatttcaaaaaatcctacaaatattgtcagctttcagtgtagtgagattattcctgtaggttatggggtataattcaggatttaactaatgtttctgctattttctcacttttccttttgatggtgcggaaagagaaaaaggaaaacggggcacaggccattcgacgccttctccaaggggtctgatttgctgagacaccagcttcaccttcttaacaaggtgcagctcagtggaagatgatgacaaccagaagacatgagctaaggtttctgtcctataaaagatttattaaaaaacaatccttcatttattttttgtctaattttttagttttcagcattatgatttgggttttattggtgtttggtatttagaattagtgctgttgtggagtgcgtctgtaaagtgcttgttttatcatacttcctgcctctcccctcccccagtttctcctcccctaaaataaaaatagtggtcaactttagtaatataaaaggctgctggatgctgagattccacataacacatggttgtcaaaattggatgttaaggattcttagaaaaacagcaaccaccagaatagcatatatctaaaagtagtcttcagctttaggcagatgcaaaagaatacaaactggaatattaagaatactgttcaactcctttagtatctgttccccaacttaccctgtagaaacctcgttattaaccagtgttccagtcttaaagtagacaaaatattcagagccattttttttaagggaaatgaaaaagatactctgggttttttatactccccaatttagcatatctagactacctatttgaaaggaaccctatcaactgtcttatgtacgttacatgattttcctacactctgtaattttgctgaggtgcaatttggaactctgcaagacctactagattgaatttatttagtgaatgctcctgaataaatgtgcattcctcttttagagtagctgtatgcttttcaaatgctatctgccgtgaattttttgcttttattatactttatggcaaaagtgatatcaagtgattgtcagacttgagggctcatagaagtgttaggtacggctctcaaagatgttacagttttttctagggttgggagaatagttgagatctggaaagcatagacattttttacactctggatagactttattcttgaagatcatcagaaatgaggttggaatttcgaggttttgagcagggggagcatcttatattcacccttaaatcgttattaatacatcctgttttcttcattccctgatagctatctcatttcactctactgtctcaaaattttgttttaaaataatagaaatgttttgccattattaagtaccactttattcctaacaaaaataagtactcaggacttttttttcaaaatgaaatatttatgtactgttttatggtatgtggtagagtaagtaaaatgtaatgttctcagttttgttccatatttgcattcctcttatgctttacctgtattttatcatttgtaagcagaactctagctatatggggtagaaataaaatctctgagatgaaacaaaggaatcaacatgataaaatttaggcgaagtagttaagaaatggcccttttgaatgttgaagataggaaagaaagccatatattcaaatatgtaattttcctcatttagttataatgacatctttaccaattgggcttcataaatgtgtttctttcttaatagtatcctagttccagcatatattcaacatgaattttatcattctcctcctaatggaatgtcttccttatagaaatgttcacgacaaattcatttgtgttttttacatgtcaataatgtatgctaaattaaaatgttttccagttattctgatagatgtcattatggcatccttaatttttcttctccttctgtatatagggtaagggactgttctgaagaacctttccatttagtgatcaagatatggaagctgatttctgaaaatgctcagtgtgtactctaattatttatggtaccatttgaattgtaacttgcattttagcagtgcatgtttctaattgacttactgggaaactgaataaaatatgcctcttattatca

SEQ ID NO: 350 - DNA, 370 bp, Artificial Sequence
  Description of Artificial sequences:primer
  misc_feature (1)..(370): 3' terminal sequence from clone image:203264. arg/abl-interacting protein argbp2(ARGBP2) gene.
  misc_feature (343)..(343): n is a, c, g, or t
  misc_feature (350)..(350): n is a, c, g, or t
  misc_feature (355)..(355): n is a, c, g, or t
  misc_feature (366)..(366): n is a, c, g, or t
ggtgaaaatgaacacagatagcggtgggtgtgctcgcaaacgtgccgccatgtctgttacgctaacatctgtgaagagagtgcaaagttctccaaacctattggctgcagggcgtgattctcagtcaccagactcagcttggagatcttacaatgatggcaatcaggagaactgaacggagatgctacatattcctctcttgcagcaaaaggttttagaagcgttcgaccaaacctacaagataaaagatcaccaactcagagccagataacagtgaatggaaactcaggaggtgccgtgagtcccatgagttactatcagggggccgtttttcccctcgggntattctnttccnggcttactcancttc

SEQ ID NO: 351 - DNA, 411 bp, Artificial Sequence
  Description of Artificial sequences:primer
  misc_feature (1)..(411): 5' terminal sequence from clone image:203264. arg/abl-interacting protein argbp2(ARGBP2) gene.
  misc_feature (327)..(327): n is a, c, g, or t
  misc_feature (372)..(372): n is a, c, g, or t
  misc_feature (386)..(386): n is a, c, g, or t
  misc_feature (406)..(406): n is a, c, g, or t
gagggctcggcgtggcttttggaaagaggtctgtaggtttgggtctttgcagcagggtgtgactgagcactgtagggtgggttgtacagacctgcattgtatgtataaggagtattatacatgtctgtgtcatcatccggcttgtgcaccatgtgaatttgcttaaacatcgtcttgtaccagtccttgggccggtcgactgtcgttctaattgctgtggggattccggattcatccactggcccgatccctgggtaatgcggggctttgatgactgtcactctcttctcttcctctgaggatcggtacagggggatagagctgctngtggtgccatccagagactgcgcatgctggggggatatgtgtctntggaattcgagggnatttggccgtgctggcattnacaat

SEQ ID NO: 352 - DNA, 4114 bp, Artificial Sequence
  Description of Artificial sequences:primer
  misc_feature (1)..(4114): arg/abl-interacting protein argbp2(ARGBP2) gene.
tccttttattgtggatgaacaccacgtacatgccgtaaatgctccctaggctggctgcggctacaaggcagacccgggagctgagaatagaggaatacctgcccaagcaactcattctgcacagcagccgacaagatagcgattttcctgtgctggaatgtgcccatccaaagacacttggattggacttaatcttaaacctctggagttcaagaccttttaaaaagggctaaataaacaatctctacatgtaaaaggccactgactcctacttcctctgtatagagcaactgttgaactcagctgcctgtagggcgtgattctcagtcaccagactcagcttggagatcttacaatgatggcaatcaggagacactgaacggagatgctacatattcctctcttgcagcaaaaggttttagaagcgttcgaccaaacctacaagataaaagatcaccaactcagagccagataacagtgaatggaaactcaggaggtgccgtgagtcccatgagttactatcagaggccgttttccccctcggcatattctctcccagcctcactcaactccagcattgtcatgcagcacggcacatccctcgattccacagacacatatccccagcatgcgcagtctctggatggcaccaccagcagctctatccccctgtaccgatcctcagaggaagagaagagagtgacagtcatcaaagccccgcattacccagggatcgggcccgtggatgaatccggaatccccacagcaattagaacgacagtcgaccggcccaaggactggtacaagacgatgtttaagcaaattcacatggtgcacaagccggatgatgacacagacatgtataatactccttatacatacaatgcaggtctgtacaacccaccctacagtgctcagtcacaccctgctgcaaagacccaaacctacagacctctttccaaaagccactccgacaacagccccaatgcctttaaggatgcgtcctccccagtgcctcccccacatgttccacctccagtcccgccgcttcgaccaagagatcggtcttcaacagaaaagcatgactgggatcctccagacagaaaagtggacacaagaaaatttcggtctgagccaaggagtatttttgaatatgaacctggcaagtcatcaattcttcagcatgaaagaccagcctccttgtatcagtcctctatagacagaagcctggaaagacccatgagttctgcaagcatggccagtgacttcaggaagcggaggaagagcgagcctgcagtgggtccaccacggggcttgggagatcaaagtgcgagcaggactagcccaggccgagtggacctcccaggatcaagcaccactcttacaaagtctttcactagctcttctccttcttccccatcaagagcaaaaggtggggatgatagcaaaatatgtccatccctttgcagttactcagggctcaacggcaacccctccagtgagttagattactgtagcacttacagacagcacttggatgtccctcgggactcaccaagagccattagtttcaagaacggctggcaaatggcccggcaaaacgcagaaatctggagcagcacggaagaaaccgtctctcccaaaatcaaatcccggagctgtgacgatctcctaaacgacgactgcgatagcttcccggacccgaaagtcaagtcggaaagcatgggctccctgttatgtgaggaggactccaaggagagctgccccatggcgtgggggtccccctacgtcccggaggttcgcagtaacggcagatcaaggatcagacacaggtcagcccgcaacgccccggggttcctgaagatgtacaagaaaatgcaccgcatcaaccgcaaggacctgatgaactccgaggtgatctgctccgtgaagtccaggattctgcagtacgagagcgagcagcagcacaaggacctgctgcgcgcctggagccagtgctccacggaggaggtgccccgggacatggtgcccacacgcatctccgaattcgaaaagctgatccagaagtccaaatccatgccaaatttaggggatgacatgctgtctcccgtaaccctagaaccaccgcaaaatggcctatgtcccaagaggcggttttccattgagtatttgctggaggaagaaaatcaaagcggcccccccgctcggggccggcgaggctgccagtctaacgccctggtgcccattcacattgaagtcaccagcgatgagcagccccgagcacacgtggagttttccgacagcgaccaggacggggttgtgtccgaccacagtgactacattcacctagaggggtcatccttctgcagtgaaagtgactttgatcacttttccttcacatcctccgaaagcttttacggatccagccaccaccaccaccatcaccaccaccaccaccaccgccacctcatcagctcctgcaaaggcaggtgcccggcctcctacactcgatttaccacaatgttaaaacacgaaagagccagacacgaaaacaccgaggagcccagaaggcaagaaatggaccctggcctttctaaacttgcttttctagtcagtcctgtgcctttccggaggaaaaaaaattcggctcctaagaaacagactgaaaaggcaaaatgtaaagcatctgtgtttgaggctctggactctgcccttaaagacatctgtgaccaaattaaagctgaaaagaaaagggggagcttgccggacaacagcatcctgcaccgcctcatcagtgagctgctgccagatgttcccgagaggaactcatccctgagagcgctgaggaggagccccctgcaccagcctctccacccactgcctcccgatggtgctattcattgtccaccctaccagaatgactgcggaagaatgccccgcagtgcctctttccaagacgtggacacagccaacagcagctgccaccaccaagaccgtggcggtgcactccaagaccgtgagtcccctagaagttactcatccactttgactgacatggggagaagtgcaccaagggaaagaagaggaactccagaaaaagagaaattgcctgcaaaagctgtttatgattttaaggctcagacatctaaggagttgtcatttaagaaaggagatactgtctacatcctcaggaaaattgatcaaaattggtatgagggagaacaccacgggagagtgggcatcttcccgatctcatacgtagagaaactcacacctcctgagaaagcacagcctgcaagaccacctccgccagcccagcccggagaaatcggagaagctatagccaaatacaacttcaacgcagacacaaatgtggagctgtcactgagaaagggagatagagttattcttcttaaaagagttgatcaaaactggtatgaaggtaaaatcccaggaaccaacagacaaggcatcttccctgtttcctatgtggaggtcgtcaagaagaacacaaaaggtgctgaggactaccctgaccctccaataccccacagctattctagtgataggattcacagcttgagctcaaataagccacagcgtcctgtgtttactcatgaaaatattcaaggtgggggggaaccgtttcaggctctgtataactatactcccaggaatgaagatgagctggagctcagagaaagtgatgtcattgatgtcatggaaaagtgtgatgacggctggtttgtggggacctcaagaagaaccaaattctttggtactttccccggaaactacgtcaagaggctgtgaattgcgctccctccttctgtagaggccgcctgccagccatgcacctgcgtcaacgcgcctgaaacaccccgcgggcctcccgttgtcatgccttacggtttccaatgcgccgtcaccatctccacctcccaccaaaccaccagcagagtagccgccgctgctgtgagcctggggacgacatggcaggctggtccccctccgtgaaagtgtggattcctacttcctgctctaagctttgacacgtcaaaatgtgggatcagaaagaaaaaaatcatgatatttaaaaatggtcaaatatttg

SEQ ID NO: 353 - DNA, 406 bp, Artificial Sequence
  Description of Artificial sequences:primer
  misc_feature (1)..(406): 3' terminal sequence from clone image:203275. replication factor c (activator 1) 4, 37kda(RFC4) gene.
  misc_feature (30)..(30): n is a, c, g, or t
  misc_feature (141)..(141): n is a, c, g, or t
  misc_feature (263)..(263): n is a, c, g, or t
  misc_feature (324)..(324): n is a, c, g, or t
  misc_feature (393)..(393): n is a, c, g, or t
  misc_feature (398)..(398): n is a, c, g, or t
ttcattatttacaaaaccccccatccaganatattcacgttaacaattctgagataactgctgcatcacagttgcacaaaggctgatgagttgcaaatgttcatcagcaccatctgctaggcatttgtcaacttcctacgngaaaaatttaagaaattagcatccttcaggtagttaaatgttccattgacatgtgcaaagtacctacttacggcaagtttttctgtgataataggacttctgtttatcagataagttatttnctacaaccacatcatgggagttgattgacgaggctgaggttgctggcatgaccctcatctnttaaatcctataataaaaaaaaacttttggggatggatggacttaatattccttttccccaagttaggnagggnggacttta

SEQ ID NO: 354 - DNA, 467 bp, Artificial Sequence
  Description of Artificial sequences:primer
  misc_feature (1)..(467): 5' terminal sequence from clone image:203275. replication factor c (activator 1) 4, 37kda(RFC4) gene.
  misc_feature (414)..(414): n is a, c, g, or t
  misc_feature (422)..(422): n is a, c, g, or t
  misc_feature (437)..(437): n is a, c, g, or t
  misc_feature (444)..(444): n is a, c, g, or t
tcctttattatgtaacatctttgcacaaggctaagtgtattttcgggctgtactttctcataatggttccccaccaccacccccgctttcctatggtgctgattcgcaataaaagtttcaataaaagctttttttttctgtcttgcacctgaccagggtgaagtaccatgcaagcatttcttaaaggtacatccatcagtactaaacccccgctgaccaaggatcgaggagtagctgccagtgcgggaagtagcggagagaacaagaaagccaaacccgttccctgggtggaaaaatatcgcccaaaatgtgtggatgaagttgctttccagggaagaagtggttgcagtgctggaaaaaatctttagaaggagtcagattctttcctaatctcttgtttttacgggaccaccngggaactnggaaaaacattccantattttnggtcagcagcttaggagaaattt

SEQ ID NO: 355 - DNA, 1427 bp, Artificial Sequence
  Description of Artificial sequences:primer
  misc_feature (1)..(1427): replication factor c (activator 1) 4, 37kda(RFC4) gene.
accggcgtattcccgccctgcttttcgcccgccgttccgtggcgggaactgaggcgactgtggggacatcagtgatcgtaagtctcctgggcccgttattctcagattaggtgacggagctaagacttcgagaccatctcgtcctttttgtatcgcggaaacctgaggaacgagccggcggcggtgacctgcacgagaagccaggctaactgggtgaagtaccatgcaagcatttcttaaaggtacatccatcagtactaaacccccgctgaccaaggatcgaggagtagctgccagtgcgggaagtagcggagagaacaagaaagccaaacccgttccctgggtggaaaaatatcgcccaaaatgtgtggatgaagttgctttccaggaagaagtggttgcagtgctgaaaaaatctttagaaggagcagatcttcctaatctcttgttttacggaccacctggaactggaaaaacatccactattttggcagcagctagagaactctttgggcctgaacttttccgattaagagttcttgagttaaatgcatctgatgaacgtggaatacaagtagttcgagagaaagtgaaaaattttgctcaattaactgtgtcaggaagtcgctcagatgggaagccgtgtccgccttttaagattgtgattctggatgaagcagattctatgacctcagctgctcaggcagctttaagacgtaccatggagaaggagtcgaaaaccacccgattctgtcttatctgtaactatgtcagtcgaataattgaacccctgacctctagatgttcaaaattccgcttcaagcctctgtcagataaaattcaacagcagcgattactagacattgccaagaaggaaaatgtcaaaattagtgatgagggaatagcttatcttgttaaagtgtcagaaggagacttaagaaaagccattacatttcttcaaagcgctactcgattaacaggtggaaaggagatcacagagaaagtgattacagacattgccggggtaataccagctgagaaaattgatggagtatttgctgcctgtcagagtggctcttttgacaaactagaagctgtggtcaaggatttaatagatgagggtcatgcagcaactcagctcgtcaatcaactccatgatgtggttgtagaaaataacttatctgataaacagaagtctattatcacagaaaaacttgccgaagttgacaaatgcctagcagatggtgctgatgaacatttgcaactcatcagcctttgtgcaactgtgatgcagcagttatctcagaattgttaacgtgaatatatctggatggggggttttgtaaataatgaagttgtaataaaaataaaatgaccaaaagcacctttaaaaaaaaaaaaaaaaaaaaaaaaaaaaaaaaaaaaaa

SEQ ID NO: 356 - DNA, 363 bp, Artificial Sequence
  Description of Artificial sequences:primer
  misc_feature (1)..(363): 3' terminal sequence from clone image:204653. colony stimulating factor 1 receptor, formerly mcdonough feline sarcoma viral (v-fms) oncogene homolog(CSF1R) gene.
  misc_feature (195)..(195): n is a, c, g, or t
  misc_feature (245)..(245): n is a, c, g, or t
tatcaatgctgttagtttaatgtggacagagacatcccacggcgtgactgttagttaggatgagtcagcttgggggagtttgtgcttcctgcttggtgtggccagccacatgccaaggtcccctgccttctagcccagaatgacgggactgggcagaacacccccaacttttagctgccacttggctcattacancagtaccagtatgggggtgggaggggtgaggctgtggagtgaaggcggcntatagggcagagactaagaggtcctgtgagattcttagaggagccatcctgctccaaggggcctgagctgagtgtggtctgtgagcatctgctgctcctctcagagagggagatctca

SEQ ID NO: 357 - DNA, 372 bp, Artificial Sequence
  Description of Artificial sequences:primer
  misc_feature (1)..(372): 5' terminal sequence from clone image:204653. colony stimulating factor 1 receptor, formerly mcdonough feline sarcoma viral (v-fms) oncogene homolog(CSF1R) gene.
  misc_feature (29)..(29): n is a, c, g, or t
  misc_feature (100)..(100): n is a, c, g, or t
  misc_feature (297)..(298): n is a, c, g, or t
  misc_feature (353)..(353): n is a, c, g, or t
  misc_feature (357)..(357): n is a, c, g, or t
gtgctgtttgaccaatggtcatgtggccnagattggggacttcgggctggctagggacatcatgaatgactccaactacattgtcaagggcaatgccgcnctgcctgtgaagtggatggccccagagagcatctttgactgtgtctacacggttcagagcgacgtctggtcctatggcatcctcctctgggagatcttctcacttgggctgaatccctaccctggcatcctggtgaacagcaagttctataaactggtgaaggatggataccaaatggcccagcctgcatttgcccnnaagaatatatacagcatcatgcaggcctgctgggcttgggagcccacccacaganccancttccagcagatctg

SEQ ID NO: 358 - DNA, 3985 bp, Artificial Sequence
  Description of Artificial sequences:primer
  misc_feature (1)..(3985): colony stimulating factor 1 receptor, formerly mcdonough feline sarcoma viral (v-fms) oncogene homolog(CSF1R) gene.
gaagggcagacagagtgtccaaaagcgtgagagcacgaagtgaggagaaggtggagaagagagaagaggaagaggaagaggaagagaggaagcggagggaactgcggccaggctaaaaggggaagaagaggatcagcccaaggaggaggaagaggaaaacaagacaaacagccagtgcagaggagaggaacgtgtgtccagtgtcccgatccctgcggagctagtagctgagagctctgtgccctgggcaccttgcagccctgcacctgcctgccacttccccaccgaggccatgggcccaggagttctgctgctcctgctggtggccacagcttggcatggtcagggaatcccagtgatagagcccagtgtccctgagctggtcgtgaagccaggagcaacggtgaccttgcgatgtgtgggcaatggcagcgtggaatgggatggccccccatcacctcactggaccctgtactctgatggctccagcagcatcctcagcaccaacaacgctaccttccaaaacacggggacctatcgctgcactgagcctggagaccccctgggaggcagcgccgccatccacctctatgtcaaagaccctgcccggccctggaacgtgctagcacaggaggtggtcgtgttcgaggaccaggacgcactactgccctgtctgctcacagacccggtgctggaagcaggcgtctcgctggtgcgtgtgcgtggccggcccctcatgcgccacaccaactactccttctcgccctggcatggcttcaccatccacagggccaagttcattcagagccaggactatcaatgcagtgccctgatgggtggcaggaaggtgatgtccatcagcatccggctgaaagtgcagaaagtcatcccagggcccccagccttgacactggtgcctgcagagctggtgcggattcgaggggaggctgcccagatcgtgtgctcagccagcagcgttgatgttaactttgatgtcttcctccaacacaacaacaccaagctcgcaatccctcaacaatctgactttcataataaccgttaccaaaaagtcctgaccctcaacctcgatcaagtagatttccaacatgccggcaactactcctgcgtggccagcaacgtgcagggcaagcactccacctccatgttcttccgggtggtagagagtgcctacttgaacttgagctctgagcagaacctcatccaggaggtgaccgtgggggaggggctcaacctcaaagtcatggtggaggcctacccaggcctgcaaggttttaactggacctacctgggacccttttctgaccaccagcctgagcccaagcttgctaatgctaccaccaaggacacatacaggcacaccttcaccctctctctgccccgcctgaagccctctgaggctggccgctactccttcctggccagaaacccaggaggctggagagctctgacgtttgagctcacccttcgataccccccagaggtaagcgtcatatggacattcatcaacggctctggcacccttttgtgtgctgcctctgggtacccccagcccaacgtgacatggctgcagtgcagtggccacactgataggtgtgatgaggcccaagtgctgcaggtctgggatgacccataccctgaggtcctgagccaggagcccttccacaaggtgacggtgcagagcctgctgactgttgagaccttagagcacaaccaaacctacgagtgcagggcccacaacagcgtggggagtggctcctgggccttcatacccatctctgcaggagcccacacgcatcccccggatgagttcctcttcacaccagtggtggtcgcctgcatgtccatcatggccttgctgctgctgctgctcctgctgctattgtacaagtataagcagaagcccaagtaccaggtccgctggaagatcatcgagagctatgagggcaacagttatactttcatcgaccccacgcagctgccttacaacgagaagtgggagttcccccggaacaacctgcagtttggtaagaccctcggagctggagcctttgggaaggtggtggaggccacggcctttggtctgggcaaggaggatgctgtcctgaaggtggctgtgaagatgctgaagtccacggcccatgctgatgagaaggaggccctcatgtccgagctgaagatcatgagccacctgggccagcacgagaacatcgtcaaccttctgggagcctgtacccatggaggccctgtactggtcatcacggagtactgttgctatggcgacctgctcaactttctgcgaaggaaggctgaggccatgctgggacccagcctgagccccggccaggaccccgagggaggcgtcgactataagaacatccacctcgagaagaaatatgtccgcagggacagtggcttctccagccagggtgtggacacctatgtggagatgaggcctgtctccacttcttcaaatgactccttctctgagcaagacctggacaaggaggatggacggcccctggagctccgggacctgcttcacttctccagccaagtagcccagggcatggccttcctcgcttccaagaattgcatccaccgggacgtggcagcgcgtaacgtgctgttgaccaatggtcatgtggccaagattggggacttcgggctggctagggacatcatgaatgactccaactacattgtcaagggcaatgcccgcctgcctgtgaagtggatggccccagagagcatctttgactgtgtctacacggttcagagcgacgtctggtcctatggcatcctcctctgggagatcttctcacttgggctgaatccctaccctggcatcctggtgaacagcaagttctataaactggtgaaggatggataccaaatggcccagcctgcatttgccccaaagaatatatacagcatcatgcaggcctgctgggccttggagcccacccacagacccaccttccagcagatctgctccttccttcaggagcaggcccaagaggacaggagagagcgggactataccaatctgccgagcagcagcagaagcggtggcagcggcagcagcagcagtgagctggaggaggagagctctagtgagcacctgacctgctgcgagcaaggggatatcgcccagcccttgctgcagcccaacaactatcagttctgctgaggagttgacgacagggagtaccactctcccctcctccaaacttcaactcctccatggatggggcgacacggggagaacatacaaactctgccttcggtcatttcactcaacagctcggcccagctctgaaacttgggaaggtgagggattcaggggaggtcagaggatcccacttcctgagcatgggccatcactgccagtcaggggctgggggctgagccctcacccccccctcccctactgttctcatggtgttggcctcgtgtttgctatgccaactagtagaaccttctttcctaatccccttatcttcatggaaatggactgactttatgcctatgaagtccccaggagctacactgatactgagaaaaccaggctctttggggctagacagactggcagagagtgagatctccctctctgagaggagcagcagatgctcacagaccacactcagctcaggccccttggagcaggatggctcctctaagaatctcacaggacctcttagtctctgccctatacgccgccttcactccacagcctcacccctcccacccccatactggtactgctgtaatgagccaagtggcagctaaaagttgggggtgttctgcccagtcccgtcattctgggctagaaggcaggggaccttggcatgtggctggccacaccaagcaggaagcacaaactcccccaagctgactcatcctaactaacagtcacgccgtgggatgtctctgtccacattaaactaacagcattaatgca

SEQ ID NO: 359 - DNA, 199 bp, Artificial Sequence
  Description of Artificial sequences:primer
  misc_feature (1)..(199): 3' terminal sequence from clone image:204740.
  misc_feature (11)..(12): n is a, c, g, or t
  misc_feature (188)..(188): n is a, c, g, or t
taaggaaaagnnttaataagtaaatatatttattaaatataaaaggtacacagtaaatataaatgaactaaatgctttagttaaaagacaataaaaattatgaaataaaaatgtatacacttgaaagtatttaaaataaatctaattttcataatgaattttaagcattaaggagttttgtaactgantagtggaactc

SEQ ID NO: 360 - DNA, 445 bp, Artificial Sequence
  Description of Artificial sequences:primer
  misc_feature (1)..(445): 3' terminal sequence from clone image:2048801. homo sapiens mrna full length insert cdna clone euroimage 1630957.
ttttttttgcacttatacctgttctcaactttaatttttttttaactttgcaggtcaattttaataaacagaagcaattaagtcaataaatgtccagtagggtcaaaaagcacacttttcagaagagaagtacaatccaatgggatttcatttcagttttgtatttgaactactgtaagaagagaagcattaatttaacatgttttcttgaggtgctgcttagctgcctgagagttacctctgcattggtgttccccaatcacagctcacagtatatgcaggcttcatatagtacagcctccaaacaccgcccacatctaccagaaaaccccagataagcagcacttcccgggataagccaacagcagtccccagagtccagcttacatggcagcatcaaccaacaagcaccacagcccctttctctgtcttttcctttatttca

SEQ ID NO: 361 - DNA, 223 bp, Artificial Sequence
  Description of Artificial sequences:primer
  misc_feature (1)..(223): 5' terminal sequence from clone image:205314. tumor protein p53 (li-fraumeni syndrome)(TP53) gene.
  misc_feature (93)..(93): n is a, c, g, or t
  misc_feature (96)..(96): n is a, c, g, or t
  misc_feature (137)..(137): n is a, c, g, or t
  misc_feature (190)..(190): n is a, c, g, or t
aagcaatggatgatttgatgctgtccccggacgatattgaacaatggttcactgaagacccaggtccagatgaagctcccagaatgccagagntgnctccccgcgtggcccctgcaccagcagctcctacaccggcngcccctgcaccagccccctcctggcccctgtcatcttctgtcccttcccaganaacctaccagggcagctacggtttccgtctggg

SEQ ID NO: 362 - DNA, 809 bp, Artificial Sequence
  Description of Artificial sequences:primer
  misc_feature (1)..(809): 3' terminal sequence from clone image:2055272. low density lipoprotein-related protein 2(LRP2) gene.
  misc_feature (419)..(419): n is a, c, g, or t
  misc_feature (652)..(652): n is a, c, g, or t
ttttatcagcagacatctttattagcaaattcagtaacaggataatctttccaaaatttacaaatatacaatatatttatagtattaccttcagacaacttcagtgcaaagatatacatatagtacattgtgataattatttgtaaaaatatgagacggcataagtaaaaaaagacacacaggatacctccaactataggcaaacagggaaaaatatatttttttcataaagtactgaatgttaacttttttcatctgtttgtaaaaaatatatgtgcaaaagtgtgtttctaattattccctaaatagctggtatagctatacttcagagtcttctttaacaagatttgcggggtctttaaaagtgtcttctggtgcagaataggttggagttgggtctcttctcgaaggaggcttangcttagcagggagcgaaggtgatggaggtggtgtcgcagcaacactttccttttgctcgttctccatctgtgcatagattggattttcaaagttggtagtttgtttagattttcgtttgaagagattccattttgtcacctgagttccatcagcagctggtgaagttgggtttgtctctggaactatctcagaagggtttatgggacttccataattcttattatccacattntcagatacaggcacctggattggctgaaccactttgacagcactgtctctggctgagtacaatgggttttcaaatattatgggctgcttccccatttccatgacaaagtctcactcattgccattgaccctgtaatagcagtctcaggtccaaaacc

SEQ ID NO: 363 - DNA, 14392 bp, Artificial Sequence
  Description of Artificial sequences:primer
  misc_feature (1)..(14392): low density lipoprotein-related protein 2(LRP2) gene.
gcagacctaaaggagcgttcgctagcagaggcgctgccggtgcggtgtgctacgcgcgcccacctcccggggaaggaacggcgaggccggggaccgtcgcggagatggatcgcgggccggcagcagtggcgtgcacgctgctcctggctctcgtcgcctgcctagcgccggccagtggccaagaatgtgacagtgcgcattttcgctgtggaagtgggcattgcatccctgcagactggaggtgtgatgggaccaaagactgttcagatgacgcggatgaaattggctgcgctgttgtgacctgccagcagggctatttcaagtgccagagtgagggacaatgcatccccagctcctgggtgtgtgaccaagatcaagactgtgatgatggctcagatgaacgtcaagattgctcacaaagtacatgctcaagtcatcagataacatgctccaatggtcagtgtatcccaagtgaatacaggtgcgaccacgtcagagactgccccgatggagctgatgagaatgactgccagtacccaacatgtgagcagcttacttgtgacaatggggcctgctataacaccagtcagaagtgtgattggaaagttgattgcagggactcctcagatgaaatcaactgcactgagatatgcttgcacaatgagttttcatgtggcaatggagagtgtatccctcgtgcttatgtctgtgaccatgacaatgattgccaagacggcagtgatgaacatgcttgcaactatccgacctgcggtggttaccagttcacttgccccagtggccgatgcatttatcaaaactgggtttgtgatggagaagatgactgtaaagataatggagatgaagatggatgtgaaagcggtcctcatgatgttcataaatgttccccaagagaatggtcttgcccagagtcgggacgatgcatctccatttataaagtttgtgatgggattttagattgcccaggaagagaagatgaaaacaacactagtaccggaaaatactgtagtatgactctgtgctctgccttgaactgccagtaccagtgccatgagacgccgtatggaggagcgtgtttttgtcccccaggttatatcatcaaccacaatgacagccgtacctgtgttgagtttgatgattgccagatatggggaatttgtgaccagaagtgtgaaagccgacctggccgtcacctgtgccactgtgaagaagggtatatcttggagcgtggacagtattgcaaagctaatgattcctttggcgaggcctccattatcttctccaatggtcgggatttgttaattggtgatattcatggaaggagcttccggatcctagtggagtctcagaatcgtggagtggccgtgggtgtggctttccactatcacctgcaaagagttttttggacagacaccgtgcaaaataaggttttttcagttgacattaatggtttaaatatccaagaggttctcaatgtttctgttgaaaccccagagaacctggctgtggactgggttaataataaaatctatctagtggaaaccaaggtcaaccgcatagatatggtaaatttggatggaagctatcgggttacccttataactgaaaacttggggcatcctagaggaattgccgtggacccaactgttggttatttatttttctcagattgggagagcctttctggggaacctaagctggaaagggcattcatggatggcagcaaccgtaaagacttggtgaaaacaaagctgggatggcctgctggggtaactctggatatgatatcgaagcgtgtttactgggttgactctcggtttgattacattgaaactgtaacttatgatggaattcaaaggaagactgtagttcatggaggctccctcattcctcatccctttggagtaagcttatttgaaggtcaggtgttctttacagattggacaaagatggccgtgctgaaggcaaacaagttcacagagaccaacccacaagtgtactaccaggcttccctgaggccctatggagtgactgtttaccattccctcagacagccctatgctaccaatccgtgtaaagataacaatgggggctgtgagcaggtctgtgttctcagccacagaacagataatgatggtttgggtttccgttgcaagtgcacattcggcttccaactggatacagatgagcgccactgcattgctgttcagaatttcctcattttttcatcccaagttgctattcgtgggatcccgttcaccttgtctacccaggaagatgtcatggttccagtttcggggaatccttctttctttgtcgggattgattttgacgcccaggacagcactatctttttttcagatatgtcaaaacacatgatttttaagcaaaagattgatggcacaggaagagaaattctcgcagctaacagggtggaaaatgttgaaagtttggcttttgattggatttcaaagaatctctattggacagactctcattacaagagtatcagtgtcatgaggctagctgataaaacgagacgcacagtagttcagtatttaaataacccacggtcggtggtagttcatccttttgccgggtatctattcttcactgattggttccgtcctgctaaaattatgagagcatggagtgacggatctcacctcttgcctgtaataaacactactcttggatggcccaatggcttggccatcgattgggctgcttcacgattgtactgggtagatgcctattttgataaaattgagcacagcacctttgatggtttagacagaagaagactgggccatatagagcagatgacacatccgtttggacttgccatctttggagagcatttattttttactgactggagactgggtgccattattcgagtcaggaaagcagatggtggagaaatgacagttatccgaagtggcattgcttacatactgcatttgaaatcgtatgatgtcaacatccagactggttctaacgcctgtaatcaacccacgcatcctaacggtgactgcagccacttctgcttcccggtgccaaatttccagcgagtgtgtgggtgcccttatggaatgaggctggcttccaatcacttgacatgcgagggggacccaaccaatgaaccacccacggagcagtgtggcttattttccttcccctgtaaaaatggcagatgtgtgcccaattactatctctgtgatggagtcgatgattgtcatgataacagtgatgagcaactatgtggcacacttaataatacctgttcatcttcggcgttcacctgtggccatggggagtgcattcctgcacactggcgctgtgacaaacgcaacgactgtgtggatggcagtgatgagcacaactgccccacccacgcacctgcttcctgccttgacacccaatacacctgtgataatcaccagtgtatctcaaagaactgggtctgtgacacagacaatgattgtggggatggatctgatgaaaagaactgcaattcgacagagacatgccaacctagtcagtttaattgccccaatcatcgatgtattgacctatcgtttgtctgtgatggtgacaaggattgtgttgatggatctgatgaggttggttgtgtattaaactgtactgcttctcaattcaagtgtgccagtggggataaatgtattggcgtcacaaatcgttgtgatggtgtttttgattgcagtgacaactcggatgaagcgggctgtccaaccaggcctcctggtatgtgccactcagatgaatttcagtgccaagaagatggtatctgcatcccgaacttctgggaatgtgatgggcatccagactgcctctatggatctgatgagcacaatgcctgtgtccccaagacttgcccttcatcatatttccactgtgacaacggaaactgcatccacagggcatggctctgtgatcgggacaatgactgcggggatatgagtgatgagaaggactgccctactcagccctttcgctgtcctagttggcaatggcagtgtcttggccataacatctgtgtgaatctgagtgtagtgtgtgatggcatctttgactgccccaatgggacagatgagtccccactttgcaatgggaacagctgctcagatttcaatggtggttgtactcacgagtgtgttcaagagccctttggggctaaatgcctatgtccattgggattcttacttgccaatgattctaagacctgtgaagacatagatgaatgtgatattctaggctcttgtagccagcactgttacaatatgagaggttctttccggtgctcgtgtgatacaggctacatgttagaaagtgatgggaggacttgcaaagttacagcatctgagagtctgctgttacttgtggcaagtcagaacaaaattattgccgacagtgtcacctcccaggtccacaatatctattcattggtcgagaatggttcttacattgtagctgttgattttgattcaattagtggtcgtatcttttggtctgatgcaactcagggtaaaacctggagtgcgtttcaaaatggaacggacagaagagtggtatttgacagtagcatcatcttgactgaaactattgcaatagattgggtaggtcgtaatctttactggacagactatgctctggaaacaattgaagtctccaaaattgatgggagccacaggactgtgctgattagtaaaaacctaacaaatccaagaggactagcattagatcccagaatgaatgagcatctactgttctggtctgactggggccaccaccctcgcatcgagcgagccagcatggacggcagcatgcgcactgtcattgtccaggacaagatcttctggccctgcggcttaactattgactaccccaacagactgctctacttcatggactcctatcttgattacatggacttttgcgattataatggacaccatcggagacaggtgatagccagtgatttgattatacggcacccctatgccctaactctctttgaagactctgtgtactggactgaccgtgctactcgtcgggttatgcgagccaacaagtggcatggagggaaccagtcagttgtaatgtataatattcaatggccccttgggattgttgcggttcatccttcgaaacaaccaaattccgtgaatccatgtgccttttcccgctgcagccatctctgcctgctttcctcacaggggcctcatttttactcctgtgtttgtccttcaggatggagtctgtctcctgatctcctgaattgcttgagagatgatcaacctttcttaataactgtaaggcaacatataatttttggaatctcccttaatcctgaggtgaagagcaatgatgctatggtccccatagcagggatacagaatggtttagatgttgaatttgatgatgctgagcaatacatctattgggttgaaaatccaggtgaaattcacagagtgaagacagatggcaccaacaggacagtatttgcttctatatctatggtggggccttctatgaacctggccttagattggatttcaagaaacctttattctaccaatcctagaactcagtcaatcgaggttttgacactccacggagatatcagatacagaaaaacattgattgccaatgatgggacagctcttggagttggctttccaattggcataactgttgatcctgctcgtgggaagctgtactggtcagaccaaggaactgacagtggggttcctgccaagatcgccagtgctaacatggatggcacatctgtgaaaactctctttactgggaacctcgaacacctggagtgtgtcactcttgacatcgaagagcagaaactctactgggcagtcactggaagaggagtgattgaaagaggaaacgtggatggaacagatcggatgatcctggtacaccagctttcccacccctggggaattgcagtccatgattctttcctttattatactgatgaacagtatgaggtcattgaaagagttgataaggccactggggccaacaaaatagtcttgagagataatgttccaaatctgaggggtcttcaagtttatcacagacgcaatgccgccgaatcctcaaatggctgtagcaacaacatgaatgcctgtcagcagatttgcctgcctgtaccaggaggattgttttcctgcgcctgtgccactggatttaaactcaatcctgataatcggtcctgctctccatataactctttcattgttgtttcaatgctgtctgcaatcagaggctttagcttggaattgtcagatcattcagaaaccatggtgccggtggcaggccaaggacgaaacgcactgcatgtggatgtggatgtgtcctctggctttatttattggtgtgattttagcagctcagtggcatctgataatgcgatccgtagaattaaaccagatggatcttctctgatgaacattgtgacacatggaataggagaaaatggagtccggggtattgcagtggattgggtagcaggaaatctttatttcaccaatgcctttgtttctgaaacactgatagaagttctgcggatcaatactacttaccgccgtgttcttcttaaagtcacagtggacatgcctaggcatattgttgtagatcccaagaacagatacctcttctgggctgactatgggcagagaccaaagattgagcgttctttccttgactgtaccaatcgaacagtgcttgtgtcagagggcattgtcacaccacggggcttggcagtggaccgaagtgatggctacgtttattgggttgatgattctttagatataattgcaaggattcgtatcaatggagagaactctgaagtgattcgttatggcagtcgttacccaactccttatggcatcactgtttttgaaaattctatcatatgggtagataggaatttgaaaaagatcttccaagccagcaaggaaccagagaacacagagccacccacagtgataagagacaatatcaactggctaagagatgtgaccatctttgacaagcaagtccagccccggtcaccagcagaggtcaacaacaacccttgcttggaaaacaatggtgggtgctctcatctctgctttgctctgcctggattgcacaccccaaaatgtgactgtgcctttgggaccctgcaaagtgatggcaagaattgtgccatttcaacagaaaatttcctcatctttgccttgtctaattccttgagaagcttacacttggaccctgaaaaccatagcccacctttccaaacaataaatgtggaaagaactgtcatgtctctagactatgacagtgtaagtgatagaatctacttcacacaaaatttagcctctggagttggacagatttcctatgccaccctgtcttcagggatccatactccaactgtcattgcttcaggtatagggactgctgatggcattgcctttgactggattactagaagaatttattacagtgactacctcaaccagatgattaattccatggctgaagatgggtctaaccgcactgtgatagcccgcgttccaaaaccaagagcaattgtgttagatccctgccaagggtacctgtactgggctgactgggatacacatgccaaaatcgagagagccacattgggaggaaacttccgggtacccattgtgaacagcagtctggtcatgcccagtgggctgactctggactatgaagaggaccttctctactgggtggatgctagtctgcagaggattgaacgcagcactctgacgggcgtggatcgtgaagtcattgtcaatgcagccgttcatgcttttggcttgactctctatggccagtatatttactggactgacttgtacacacaaagaatttaccgagctaacaaatatgacgggtcaggtcagattgcaatgaccacaaatttgctctcccagcccaggggaatcaacactgttgtgaagaaccagaaacaacagtgtaacaatccttgtgaacagtttaatgggggctgcagccatatctgtgcaccaggtccaaatggtgccgagtgccagtgtccacatgagggcaactggtatttggccaacaacaggaagcactgcattgtggacaatggtgaacgatgtggtgcatcttccttcacctgctccaatgggcgctgcatctcggaagagtggaagtgtgataatgacaacgactgtggggatggcagtgatgagatggaaagtgtctgtgcacttcacacctgctcaccgacagccttcacctgtgccaatgggcgatgtgtccaatactcttaccgctgtgattactacaatgactgtggtgatggcagtgatgaggcagggtgcctgttcagggactgcaatgccaccacggagtttatgtgcaataacagaaggtgcatacctcgtgagtttatctgcaatggtgtagacaactgccatgataataacacttcagatgagaaaaattgccctgatcgcacttgccagtctggatacacaaaatgtcataattcaaatatttgtattcctcgcgtttatttgtgtgacggagacaatgactgtggagataacagtgatgaaaaccctacttattgcaccactcacacatgcagcagcagtgagttccaatgcgcatctgggcgctgtattcctcaacattggtattgtgatcaagaaacagattgttttgatgcctctgatgaacctgcctcttgtggtcactctgagcgaacatgcctagctgatgagttcaagtgtgatggtgggaggtgcatcccaagcgaatggatctgtgacggtgataatgactgtggggatatgagtgacgaggataaaaggcaccagtgtcagaatcaaaactgctcggattccgagtttctctgtgtaaatgacagacctccggacaggaggtgcattccccagtcttgggtctgtgatggcgatgtggattgtactgacggctacgatgagaatcagaattgcaccaggagaacttgctctgaaaatgaattcacctgtggttacggactgtgtatcccaaagatattcaggtgtgaccggcacaatgactgtggtgactatagcgacgagaggggctgcttataccagacttgccaacagaatcagtttacctgtcagaacgggcgctgcattagtaaaaccttcgtctgtgatgaggataatgactgtggagacggatctgatgagctgatgcacctgtgccacaccccagaacccacgtgtccacctcacgagttcaagtgtgacaatgggcgctgcatcgagatgatgaaactctgcaaccacctagatgactgtttggacaacagcgatgagaaaggctgtggcattaatgaatgccatgacccttcaatcagtggctgcgatcacaactgcacagacaccttaaccagtttctattgttcctgtcgtcctggttacaagctcatgtctgacaagcggacttgtgttgatattgatgaatgcacagagatgccttttgtctgtagccagaagtgtgagaatgtaataggctcctacatctgtaagtgtgccccaggctacctccgagaaccagatggaaagacctgccggcaaaacagtaacatcgaaccctatctcatttttagcaaccgttactatttgagaaatttaactatagatggctatttttactccctcatcttggaaggactggacaatgttgtggcattagattttgaccgagtagagaagagattgtattggattgatacacagaggcaagtcattgagagaatgtttctgaataagacaaacaaggagacaatcataaaccacagactaccagctgcagaaagtctggctgtagactgggtttccagaaagctctactggttggatgcccgcctggatggcctctttgtctctgacctcaatggtggacaccgccgcatgctggcccagcactgtgtggatgccaacaacaccttctgctttgataatcccagaggacttgcccttcaccctcaatatgggtacctctactgggcagactggggtcaccgcgcatacattgggagagtaggcatggatggaaccaacaagtctgtgataatctccaccaagttagagtggcctaatggcatcaccattgattacaccaatgatctactctactgggcagatgcccacctgggttacatagagtactctgatttggagggccaccatcgacacacggtgtatgatggggcactgcctcaccctttcgctattaccatttttgaagacactatttattggacagattggaatacaaggacagtggaaaagggaaacaaatatgatggatcaaatagacagacactggtgaacacaacacacagaccatttgacatccatgtgtaccatccatataggcagcccattgtgagcaatccctgtggtaccaacaatggtggctgttctcatctctgcctcatcaagccaggaggaaaagggttcacttgcgagtgtccagatgacttccgcacccttcaactgagtggcagcacctactgcatgcccatgtgctccagcacccagttcctgtgcgctaacaatgaaaagtgcattcctatctggtggaaatgtgatggacagaaagactgctcagatggctctgatgaactggccctttgcccgcagcgcttctgccgactgggacagttccagtgcagtgacggcaactgcaccagcccgcagactttatgcaatgctcaccaaaattgccctgatgggtctgatgaagaccgtcttctttgtgagaatcaccactgtgactccaatgaatggcagtgcgccaacaaacgttgcatcccagaatcctggcagtgtgacacatttaacgactgtgaggataactcagatgaagacagttcccactgtgccagcaggacctgccggccgggccagtttcggtgtgctaatggccgctgcatcccgcaggcctggaagtgtgatgtggataatgattgtggagaccactcggatgagcccattgaagaatgcatgagctctgcccatctctgtgacaacttcacagaattcagctgcaaaacaaattaccgctgcatcccaaagtgggccgtgtgcaatggtgtagatgactgcagggacaacagtgatgagcaaggctgtgaggagaggacatgccatcctgtgggggatttccgctgtaaaaatcaccactgcatccctcttcgttggcagtgtgatgggcaaaatgactgtggagataactcagatgaggaaaactgtgctccccgggagtgcacagagagcgagtttcgatgtgtcaatcagcagtgcattccctcgcgatggatctgtgaccattacaacgactgtggggacaactcagatgaacgggactgtgagatgaggacctgccatcctgaatattttcagtgtacaagtggacattgtgtacacagtgaactgaaatgcgatggatccgctgactgtttggatgcgtctgatgaagctgattgtcccacacgctttcctgatggtgcatactgccaggctactatgttcgaatgcaaaaaccatgtttgtatcccgccatattggaaatgtgatggcgatgatgactgtggcgatggttcagatgaagaacttcacctgtgcttggatgttccctgtaattcaccaaaccgtttccggtgtgacaacaatcgctgcatttatagtcatgaggtgtgcaatggtgtggatgactgtggagatggaactgatgagacagaggagcactgtagaaaaccgacccctaaaccttgtacagaatatgaatataagtgtggcaatgggcattgcattccacatgacaatgtgtgtgatgatgccgatgactgtggtgactggtccgatgaactgggttgcaataaaggaaaagaaagaacatgtgctgaaaatatatgcgagcaaaattgtacccaattaaatgaaggaggatttatctgctcctgtacagctgggttcgaaaccaatgtttttgacagaacctcctgtctagatatcaatgaatgtgaacaatttgggacttgtccccagcactgcagaaataccaaaggaagttatgagtgtgtctgtgctgatggcttcacgtctatgagtgaccgccctggaaaacgatgtgcagctgagggtagctctcctttgttgctactgcctgacaatgtccgaattcgaaaatataatctctcatctgagaggttctcagagtatcttcaagatgaggaatatatccaagctgttgattatgattgggatcccaaggacataggcctcagtgttgtgtattacactgtgcgaggggagggctctaggtttggtgctatcaaacgtgcctacatccccaactttgaatccggccgcaataatcttgtgcaggaagttgacctgaaactgaaatacgtaatgcagccagatggaatagcagtggactgggttggaaggcatatttactggtcagatgtcaagaataaacgcattgaggtggctaaacttgatggaaggtacagaaagtggctgatttccactgacctggaccaaccagctgctattgctgtgaatcccaaactagggcttatgttctggactgactggggaaaggaacctaaaatcgagtctgcctggatgaatggagaggaccgcaacatcctggttttcgaggaccttggttggccaactggcctttctatcgattatttgaacaatgaccgaatctactggagtgacttcaaggaggacgttattgaaaccataaaatatgatgggactgataggagagtcattgcaaaggaagcaatgaacccttacagcctggacatctttgaagaccagttatactggatatctaaggaaaagggagaagtatggaaacaaaataaatttgggcaaggaaagaaagagaaaacgctggtagtgaacccttggctcactcaagttcgaatctttcatcaactcagatacaataagtcagtgcccaacctttgcaaacagatctgcagccacctctgccttctgagacctggaggatacagctgtgcctgtccccaaggctccagctttatagaggggagcaccactgagtgtgatgcagccatcgaactgcctatcaacctgccccccccatgcaggtgcatgcacggaggaaattgctattttgatgagactgacctccccaaatgcaagtgtcctagcggctacaccggaaaatattgtgaaatggcgttttcaaaaggcatctctccaggaacaaccgcagtagctgtgctgttgacaatcctcttgatcgtcgtaattggagctctggcaattgcaggattcttccactatagaaggaccggctcccttttgcctgctctgcccaagctgccaagcttaagcagtctcgtcaagccctctgaaaatgggaatggggtgaccttcagatcaggggcagatcttaacatggatattggagtgtctggttttggacctgagactgctattgacaggtcaatggcaatgagtgaagactttgtcatggaaatggggaagcagcccataatatttgaaaacccaatgtactcagccagagacagtgctgtcaaagtggttcagccaatccaggtgactgtatctgaaaatgtggataataagaattatggaagtcccataaacccttctgagatagttccagagacaaacccaacttcaccagctgctgatggaactcaggtgacaaaatggaatctcttcaaacgaaaatctaaacaaactaccaactttgaaaatccaatctatgcacagatggagaacgagcaaaaggaaagtgttgctgcgacaccacctccatcaccttcgctccctgctaagcctaagcctccttcgagaagagacccaactccaacctattctgcaacagaagacacttttaaagacaccgcaaatcttgttaaagaagactctgaagtatagctataccagctatttagggaataattagaaacacacttttgcacatatattttttacaaacagatgaaaaaagttaacattcagtactttatgaaaaaaatatatttttccctgtttgcctataggtggaggtatcctgtgtgtctttttttacttatgccgtctcatatttttacaaataattatcacaatgtactatatgtatatctttgcactgaagttgtctgaaggtaatactataaatatattgtatatttgtaaattttggaaagattatcctgttactgaatttgctaataaagatgtctgctgaaaaaaaa

SEQ ID NO: 364 - DNA, 459 bp, Artificial Sequence
  Description of Artificial sequences:primer
  misc_feature (1)..(459): 3' terminal sequence from clone image:205612. sp110 nuclear body protein(SP110) gene.
  misc_feature (1)..(1): n is a, c, g, or t
  misc_feature (224)..(224): n is a, c, g, or t
  misc_feature (406)..(406): n is a, c, g, or t
  misc_feature (412)..(412): n is a, c, g, or t
  misc_feature (423)..(423): n is a, c, g, or t
  misc_feature (428)..(428): n is a, c, g, or t
  misc_feature (455)..(455): n is a, c, g, or t
ncttgtctgaaggtgtgctggacacctcctggggctcttctgggtcatttggttctggagaattatctcttatctctggcatagagcccaagggagagtggggcatctcttgagggtcttctttatctcttatttgggggatcaggttgtcactggccacttgcacagtgctagtgaggaggctgggcatctcttctgagtcttctttcgcattcattttggangttaacttgtcattggtcactgaagtgcttcttccttcctgggatgagtgcagggagaggcaggacagggtcagatgggctgggcgactcactcaggatctcatcgctttgctgggaggatgttccagggctcactgactcttgggcgcacaaggtgaaacagcttggtttgaagggggttnttggtngggggcaagcncaatngggtatggaaggaagcttccctctaanaagg

SEQ ID NO: 365 - DNA, 370 bp, Artificial Sequence
  Description of Artificial sequences:primer
  misc_feature (1)..(370): 5' terminal sequence from clone image:205612. sp110 nuclear body protein(SP110) gene.
  misc_feature (102)..(102): n is a, c, g, or t
  misc_feature (365)..(365): n is a, c, g, or t
tgcgtttgtcaaagcacagacttcctgttttgcctgctagcatctccctgtaactctcccaatcttgaggagtgatccctgtcccagcccctggaaaggganggaaacgacaaactcaaagtccaggatgttcaccatgacaagagccatggaagaggctctttttcagcacttcatgcaccagaagctggggatcgcctatgccatacacaagccatttcccttctttgaaggcctcctagacaactccatcatcactaagagaatgtacatggaatctctggaagcctgtagaaatttgatccctgtatccagagtggtgcacaacattctcacccaactgggagaggactttttaacctgtnctctt

SEQ ID NO: 366 - DNA, 2431 bp, Artificial Sequence
  Description of Artificial sequences:primer
  misc_feature (1)..(2431): sp110 nuclear body protein(SP110) gene.
gttttgcctgctagcatctccctgtaactctcccaatcttgaggagtgatccctgtcccagcccctggaaaggggcaggaacgacaaactcaaagtccaggatgttcaccatgacaagagccatggaagaggctctttttcagcacttcatgcaccagaagctggggatcgcctatgccatacacaagccatttcccttctttgaaggcctcctagacaactccatcatcactaagagaatgtacatggaatctctggaagcctgtagaaatttgatccctgtatccagagtggtgcacaacattctcacccaactggagaggacttttaacctgtctcttctggtgacattgttcagtcaaattaacctgcgtgaatatcccaatctggtgacgatttacagaagcttcaaacgtgttggtgcttcctatgaacggcagagcagagacacaccaatcctacttgaagccccaactggcctagcagaaggaagctccctccataccccactggcgctgcccccaccacaaccccctcaaccaagctgttcaccctgtgcgccaagagtcagtgagcctggaacatcctcccagcaaagcgatgagatcctgagtgagtcgcccagcccatctgaccctgtcctgcctctccctgcactcatccaggaaggaagaagcacttcagtgaccaatgacaagttaacatccaaaatgaatgcggaagaagactcagaagagatgcccagcctcctcactagcactgtgcaagtggccagtgacaacctgatcccccaaataagagataaagaagaccctcaagagatgccccactctcccttgggctctatgccagagataagagataattctccagaaccaaatgacccagaagagccccaggaggtgtccagcacaccttcagacaagaaaggaaagaaaagaaaaagatgtatctggtcaactccaaaaaggagacataagaaaaaaagcctcccaagagggacagcctcatctagacacggaatccaaaagaagctcaaaagggtggatcaggttcctcaaaagaaagatgactcaacttgtaactccacggtagagacaagggcccaaaaggcgagaactgaatgtgcccgaaagtcgagatcagaggagatcattgatggcacttcagaaatgaatgaaggaaagaggtcccagaagacgcctagtacaccacgaagggtcacacaaggggcagcctcacctgggcatggcatccaagagaagctccaagtggtggataaggtgactcaaaggaaagacgactcaacctggaactcagaggtcatgatgagggtccaaaaggcaagaactaaatgtgcccgaaagtccagatcgaaagaaaagaaaaaggagaaagatatctgttcaagctcaaaaaggagatttcagaaaaatattcaccgaagaggaaaacccaaaagtgacactgtggattttcactgttctaagctccccgtgacctgtggtgaggcgaaagggattttatataagaagaaaatgaaacacggatcctcagtgaagtgcattcggaatgaggatggaacttggttaacaccaaatgaatttgaagtcgaaggaaaaggaaggaacgcaaagaactggaaacggaatatacgttgtgaaggaatgaccctaggagagctgctgaagcggaaaaactcggatgaatgcgaggtgtgctgtcaagggggacaacttctctgctgcggtacttgtccacgagtcttccatgaggactgtcacatcccccctgtggaagccaagaggatgctgtggagttgcaccttctgcaggatgaagaggtcttcaggaagccaacagtgccatcatgtatctaagaccctggagaggcagatgcagcctcaggaccagctgaaatgtgagttcctcctcttgaaggcctactgtcatccacaaagctccttttttacgggcatcccatttaatattcgagattacggtgagccctttcaggaagcaatgtggttggacctggttaaggaaaggctgattacggaaatgtacacggtggcatggtttgtgcgagacatgcgcctgatgtttcgcaaccataaaacattttacaaggcttctgactttggccaggtaggacttgacttagaggcagaatttgaaaaagatctcaaagacgtgctcggttttcatgaagccaatgacggcggtttctggactcttccttgaccctgttctgtaaagactgaagcatccccacctcaggattcagctgatgggaccctggcttggactgttgattgccagtgagtctgggatgtaattggctgccctcaggacccaaacccagacacttcataggattatcacaccctccatctttattctttctttttacctttaaaagtctatatcta

SEQ ID NO: 367 - DNA, 431 bp, Artificial Sequence
  Description of Artificial sequences:primer
  misc_feature (1)..(431): 5' terminal sequence from clone image:206323. cyclin f(CCNF) gene.
  misc_feature (289)..(289): n is a, c, g, or t
  misc_feature (416)..(416): n is a, c, g, or t
tgcaaaaagaattttcccagataggctagccagaaaaaacttcaagtcctctgtaacatctgaggtgaccaagaggcagaagagcagagcagtcgggggccgtgtcctggctgatcccaactgcagctctgctgtgggggcccgtgggagggaggcagacccctgggctttcctgctggccacggagactctgctcctgcatggaaagggagcctgggagccagcagcccacgcctggggagcctgcctggggccatgtgaccatggccttctccctgggaacgggctnaccacaacacaccctgctgccatccacttctgtttacttctgcaaatgttaagaaagaaccacttgggccagaagtgttcccccagatggttttttttttttttttttgggagacagttttgctttngttttccccggttgg

SEQ ID NO: 368 - DNA, 4238 bp, Artificial Sequence
  Description of Artificial sequences:primer
  misc_feature (1)..(4238): cyclin f(CCNF) gene.
gcgctctcaggcgggctccggcggcagcgacgcgagcgcggcgatggggagcggcggcgtggtccactgtaggtgtgccaagtgtttctgttatcctacaaagcgaagaataaggaggaggccccgaaacctgaccatcttgagtctccccgaagatgtgctctttcacatcctgaaatggctttctgtagaggacatcctggccgtccgagctgtacactcccagctgaaggacctggtggacaaccacgccagtgtgtgggcatgtgccagcttccaggagctgtggccgtctccagggaacctgaagctctttgaaagggctgctgaaaaggggaatttcgaagctgctgtgaagctgggcatagcctacctctacaatgaaggcctgtctgtgtctgatgaggcccgcgcagaagtgaatggcctgaaggcctctcgcttcttcagtctcgctgagcggctgaatgtgggtgccgcacctttcatctggctcttcatccgccctccgtggtcggtgagcggaagctgctgcaaggccgtggttcacgagagcctcagggcagagtgccagctgcagaggactcacaaagcatccatattgcactgcttgggcagagtgctgagtctgttcgaggatgaggagaagcagcagcaggcccatgacctgtttgaggaggctgctcatcagggatgtctgaccagctcctacctcctctgggaaagcgacaggaggacagatgtgtcagatcctgggcgatgcctccacagcttccgaaaactcagggactacgctcgcaaaggctgctgggaagcgcagctgtctttagccaaagcctgtgcaaatgcaaaccagcttggactggaggtgagagcttccagtgagatcgtctgccagctatttcaggcttcccaggctgtcagtaaacaacaagtcttctccgtgcagaagggactcaatgacacaatgaggtacattctgatcgactggctggtggaagttgccaccatgaatgacttcacaagcctgtgcctgcacctgaccgtggagtgtgtggaccggtacctgcggaggaggctggtgccgcggtacaggctccagctgctgggcatcgcctgcatggtcatctgcacccggtttatcagtaaagagatcctgaccatccgggaggccgtatggctcacggacaacacttacaagtacgaggacctggtgagaatgatgggcgagatcgtctccgccttggaagggaagattcgagtccccactgtggtggattacaaggaggtcctgctgacgctagtccctgtggagctgagaacccagcacctgtgcagcttcctctgcgagctctccctgctgcacaccagcctgtccgcctacgccccagcccgcctggctgccgcagccctgctcctggccagactgacgcacgggcagacacagccctggaccactcagctgtgggacctcaccggattctcctatgaagacctcattccctgcgtcttgagcctccataagaagtgcttccatgatgacgcccccaaggactacaggcaagtctctctgaccgccgtgaagcagcggtttgaggacaagcgctatggagaaatcagccaggaagaggtgctgagctacagccagttgtgtgctgcattaggagtgacacaagacagccccgaccccccgactttcctcagcacaggggagatccacgccttcctcagctctccctcggggcggagaaccaaacggaagcgggagaacagcctccaggaagacagaggcagcttcgttaccacccccactgcggagctgtccagccaggaggagaccgtgctgggcagcttcctcgactggagcctggactgctgctctggctatgaaggcgaccaggagagtgagggcgagaaggagggcgacgtgacagctcccagcggcatcctcgatgtcaccgtggtctacctgaacccagaacagcattgctgccaggaatccagtgatgaggaggcttgtccagaggcaaagggaccccaggacccacaggcactggcgctggacacccagatccctgcaacccctggacccaaacccctggtccgcaccagccgggagccagggaaggacgtcacgacctcagggtactcctccgtcagcaccgcaagtcccacaagctccgtggacggtggcttgggggccctgccccaacctacctcagtgctgtccctgcacagtgactcgcacacacagccctgccaccatcaggccaggaagtcatgtttacagtgtcgtcccccaagtcccccggagagcagtgttccccagcaacaggtgaagcggataaacctatgcatacacagtgaggaggaggacatgaacctgggccttgtgaggctgtaagtgtgtcagcacatttgccgcagtggatgtgtactgagggggctggaggcgaagggtgggagcatagcataggaacgctgcatagaccatggaggcctttgcgcagagagcagagaggatgacttgcggccaccaagtttctgtctccgcgggagtcccgtgcaagccatcagaatgttgaaatgagggtgaagagctcagatccctctctttggaaagtttagcctggaagcagttggccacactgtgtggagggcacctctctgtcccttccgtgtctcactgtctctggaagcttcagcccatgtgtgtcctggtgttcccagccccaccagagccccgtgccgggagctgacagctttcacgcttaaggcacgtgtgacctgggtagtcagacaccacttgagcccctgcccacatctgctggtttggggcttcagtggggagctgacagctgtgagcacaccactgtcccctcatccacctcggcctgcatggggcacccacttccttctgggtggggcttccatggtaagggggcctgcgtccctgcacactgcgaggactgccttgccacaggcccactccctacgacacgtgactcgttttagagctctgtcccagaggcgttcgtatgtgacccacagatggcgtcaatgtgaacacctctctttgtgctgaatttctgggccattcttttcctgtcttatttctaaatttccttcttccaagatgaaaacaaaagaaaaacttaaaacagaaggtattaaaaaaacaagagattcccaccattatttaggttcacctgcaaaacaaaaatcttactccagcccctcaatgccatcctgacacactttatgcaaaaagaattttcccagataggctagccagaaaaaacttcaagtcctctgtaacatctgaggtgaccaagaggcagaagagcagagcagtcgggggccgtgtcctggctgatcccaactgcagctctgctgtgggggcccgtgggagggaggcagacccctgggctttcctgctggccacggagactctgctcctgcatggaaagggagcctgggagccagcagcccacgcctggggagcctgcctggggccatgtgaccatggcctctccctgggaacgggctgaccacaacacaccctgctgccatccacttctgtttactctgcaaatgtaagaaagaaccacttggccagaagtgtcccccagatgcttttttttttttttttttggagacagttttgctcttgtctccccggctggagtgcagtggcatgatctcaactctcaactcactgtaacctccgcctcccggatactcctgcctcagcctcctgggtagctgggattacaagcacccaaccacgcccagctaatttttgtattttcggtagagacgggatttcaccatgttggccaggctagtctcgaactcatgacctcaagtgatccgcccacttcggtctcccaaagtgctgggattacaggcatgagccacggcgcctggcccccaaatgctcttgaaccggaaacccagggatgggagatgctcactgagctgctgcttttatgtgtgctggtgctatgtgtgttcatgtccgcggcagctgtctttttgctactataagggaattctggccaccctgggtggggtgtggtcggggtgagaacccaagcgttggaactgtagacccgtcctgtcgactgtgtgcccctgggcatgtgtgagcctcagtttcctcatctgtaaggggggcaatgatacctacctcacagggggttgtgaggattaaatgtgaggaggatagtggcaac

SEQ ID NO: 369 - DNA, 461 bp, Artificial Sequence
  Description of Artificial sequences:primer
  misc_feature (1)..(461): 3' terminal sequence from clone image:206522. calpain 12(CAPN12) gene.
  misc_feature (309)..(309): n is a, c, g, or t
  misc_feature (359)..(359): n is a, c, g, or t
  misc_feature (453)..(453): n is a, c, g, or t
attctgattgattttttttcttggtttctggataaaccaccctctggggacaggataataaaacatgtaatatttttaagaaggattcctgcagcatcatctttttttatttctcctgtgtctgtcctccaccttctaggagagccagggcagagctagcactgtcttaagctgtcaacgtggactagctcgtgtcatctgctcgagaagggctgtcgctgttcttgtttctgagtgaggagtacgcaggccagagtgggtcacccggccgtgagcagtgaggggccagagactagccccagacagggnggatgccagagagagtgggcaccccatgccagggggaaggcctagggganggtgggtctttgcttcagcaacccttgcccttgaggcagcaggttgcgcccattcccgagatcccaggggagaaggttggccacttccatccantttttttg

SEQ ID NO: 370 - DNA, 378 bp, Artificial Sequence
  Description of Artificial sequences:primer
  misc_feature (1)..(378): 5' terminal sequence from clone image:206522. calpain 12(CAPN12) gene.
  misc_feature (62)..(62): n is a, c, g, or t
  misc_feature (111)..(111): n is a, c, g, or t
  misc_feature (133)..(133): n is a, c, g, or t
  misc_feature (316)..(316): n is a, c, g, or t
  misc_feature (334)..(334): n is a, c, g, or t
  misc_feature (357)..(357): n is a, c, g, or t
  misc_feature (365)..(365): n is a, c, g, or t
  misc_feature (371)..(371): n is a, c, g, or t
cgaagaactcaatgcctctcagctccaggccttactaagcattgccctggagcctgccaggnccatacctccacccccagagagatcgggctcaggacctgtgagcagctnctgcagtgtttcgggcatgggnaaagctggccttacaccacttccagcagctctggggctacctcctggagtggcaggccatattcaacaagttcgatgaggacacctctggaaccatgaactcctacgagctgaggctggcactgaatgcagcaggcttccacctgaacaaccagctgacccagaccctcaccagccgctaccnggatagccgtctgcgttntggacttcgagctgttcgtgtcntgtgtggncccacnttacctg

SEQ ID NO: 371 - DNA, 423 bp, Artificial Sequence
  Description of Artificial sequences:primer
  misc_feature (1)..(423): 3' terminal sequence from clone image:2067776. growth factor receptor-bound protein 14(GRB14) gene.
  misc_feature (371)..(371): n is a, c, g, or t
  misc_feature (386)..(386): n is a, c, g, or t
cctaaggtttaattttaactaatgaattttaaatgatgaatgtaaagtcaatccaagtctttgcttatttgcaatgcacaaactatttttttgtaacttgcaggtgaaatacattcttttcacatgataacgttttcgcccttatttatggtcttttattatttttcttgagtccttttccttcaatagtttaataagtcacttctggcttgtctagagagcaatcctagcacaataatgtttcaacttgcaaggaagaacgcccttattgagttgatagaactccaccagctgtattagatctgtaaatcttgtgtggccatcatccagtgtgtggaacatttcaccgtcatcttctactggtataattngaaagtgctttattnttttgtcatgactcattgacagtacaaaagttttggg

SEQ ID NO: 372 - DNA, 2376 bp, Artificial Sequence
  Description of Artificial sequences:primer
  misc_feature (1)..(2376): growth factor receptor-bound protein 14(GRB14) gene.
cggatgagggtcagggctgcgcggacccctatcccgcctgcgtcctcccggcaagcccagcgggagcgcccgctcggctgggtccccgcctccagcgcgccggggccgcccagaccctgggctcagcctcgcgccccggtgcccacctgaggaggcggcggtcccggcctcgcgtcccggatgggacggcgcgggagcaatgccagtggccccgagcgccccgggccacgcgcggggccggccagccgctctcgcgccctccccgccccctccgcgccttgcctcgccgcccgcgcgccccacccaccggccgctcctcccctctccccaccctcctcctccgccccctcccctcccccgccgcctcgcagatagctcggccgcgcgtctcagccgccggggccccgagcgcaggcggcgaggccaccacacctgcagagcgctcgggctgcctaggcggcacctcgcctcccgccgcgcaaaccccttctccccacgcgccgagtctcccatgacgcccgagccccccggccggcgacaatgaccacttccctgcaagatgggcagagcgccgcgagcagggcggctgcccgggattcgccgctggccgcccaggtgtgtggcgctgcccaggggaggggcgacgcccacgacctggcgccggccccctggctgcacgcgcgagcgctcctgccccttccggacgggacccgcggctgtgctgcagacaggagaaaaaagaaagatcttgatgttccggaaatgccatctattccaaacccttttcctgagctatgctgttctccaattacatctgtgttgtcagcagacctatttcccaaagcaaattcaaggaaaaaacaggtgattaaagtatacagtgaagatgaaaccagcagggctttagatgtacccagtgacataacggctcgagatgtttgtcagctgttgatcctgaagaatcattacattgatgaccacagctggaccctttttgagcacctgcctcacataggtgtagaaagaacaatagaagaccacgaactggtgattgaagtgctatccaactgggggatagaagaagaaaacaaactatactttagaaaaaattatgccaaatatgagttctttaaaaacccaatgtatttttttccagagcatatggtatcttttgcaactgaaaccaatggtgaaatatcccccacacagattttgcagatgtttctgagttcaagcacatatcctgaaattcatggtttcttacatgcgaaagaacagggaaagaagtcttggaaaaaaatttacttttttctaagaagatctggtttatatttttctactaaaggaacatcaaaggaaccgcggcatttgcagtttttcagcgaatttggcaatagtgatatttatgtgtcactggcaggcaaaaaaaaacatggagcaccgactaactatggattctgctttaagcctaacaaagcgggagggccccgagacctgaaaatgctctgtgcagaagaagagcagagtaggacgtgctgggtgaccgcgattagattgcttaagtatggcatgcagctgtaccagaattatatgcatccatatcaaggtagaagtggctgcagttcacagagcatatcacctatgagaagtatatcagagaattccctggtagcaatggacttctcaggccagaaaagcagagttatagaaaatcccactgaagccctttcagttgcggttgaagaaggactcgcttggaggaaaaaaggatgtttacgcctgggcactcacggtagccccactgcctcttcacagagctctgccacaaacatggctatccaccggtcccagccatggtttcaccacaaaatttctagagatgaggctcagcgattgattattcagcaaggacttgtggatggagttttcttggtacgggatagtcagagtaaccccaaaactttcgtactgtcaatgagtcatggacaaaaaataaagcactttcaaattataccagtagaagatgacggtgaaatgttccacacactggatgatggccacacaagatttacagatctaatacagctggtggagttctatcaactcaataagggcgttcttccttgcaagttgaaacattattgtgctaggattgctctctagacaagccagaagtgacttattaaactattgaaggaaaaggactcaagaaaaataataaaagaccataaataagggcgaaaacattatcatgtgaaaagaatgtatttcacctgcaagttacaaaaaaatagtttgtgcattgcaaataagcaaagacttggattgactttacattcatcatttaaaattcattagttaaaattaaaccttagg

SEQ ID NO: 373 - DNA, 415 bp, Artificial Sequence
  Description of Artificial sequences:primer
  misc_feature (1)..(415): 3' terminal sequence from clone image:207491. dead (asp-glu-ala-asp) box polypeptide 24(DDX24) gene.
  misc_feature (404)..(404): n is a, c, g, or t
caagtttaacacacaagaagcctataaacactgcaatacagaaaaattaagctgctgcattgaattcttactccaaaacaatgcaaatctgcatgaggtctctcccgctatgggtgtgagtggaagagagggagacttttttacctggggttggtggtggagtgaaacacaagggtgggagaggttttgcaaatagccagagaacagaaaccaatgtgcagtcactgacacacttgaccagttaatttgcacttgtacttgggctgtggctgttccggctgtggctccttcggcttctttgtcttcttcttcttctgcttggggagacagctcaaagcagacttcgctcttacttgggggcagacacaagcaggggcggctttgccagactgagtggggtactnggtttctggcc

SEQ ID NO: 374 - DNA, 435 bp, Artificial Sequence
  Description of Artificial sequences:primer
  misc_feature (1)..(435): 5' terminal sequence from clone image:207491. dead (asp-glu-ala-asp) box polypeptide 24(DDX24) gene.
  misc_feature (288)..(288): n is a, c, g, or t
  misc_feature (333)..(333): n is a, c, g, or t
  misc_feature (397)..(397): n is a, c, g, or t
  misc_feature (406)..(406): n is a, c, g, or t
gatattcctaaagtccagcatgtcatccattaccaggtcccacgtacctcggagatttatgtccaccgaagtggtcgaactgctcgagctaccaatgaaggcctcagtctgatgctcattgggcctgaggatgtgatcaactttaagaagatttacaaaacgctcaagaaagatgaggatatcccactgttccccgtgcagacaaaatacatggatgtggtcaaggagcgaatccgtttagctcgacagattgagaaatctgagtatcggaacttccaggcttgctgncacaactcttgggattgagcaggcagcagctgccctgggagattnagctgggaggaagacatgtattaaggggagggaaaagcttgaccagcaagtaggaacgttcggnaggcaaaanaggcaggttggaaggtttttgtaaggaag

SEQ ID NO: 375 - DNA, 2967 bp, Artificial Sequence
  Description of Artificial sequences:primer
  misc_feature (1)..(2967): dead (asp-glu-ala-asp) box polypeptide 24(DDX24) gene.
ccggaactgcagttgctgctgcagctgaggtacagcggcggtttctgaggttcttcactcgcgactgacggagctgcggtggcgtctccacacgcaaccatgaagttgaaggacacaaaatcaaggccaaagcagtcaagctgtggcaaatttcagacaaagggaatcaaagttgtgggaaaatggaaggaagtgaagattgacccaaatatgtttgcagatggacagatggatgacttggtgtgctttgaggaattgacagattaccagttggtctcccctgccaagaatccctccagtctcttctcaaaggaagcacccaagagaaaggcacaagctgtttcagaagaagaggaggaggaggagggaaagtctagctcaccaaagaaaaagatcaagttgaagaaaagtaaaaatgtagcaactgaaggaaccagtacccagaaagaatttgaagtgaaagatcctgagctggaggcccagggagatgacatggtttgtgatgatccggaggctggggagatgacatcagaaaacctggtccaaactgctccaaaaaagaagaaaaataaagggaaaaaagggttggagccttctcagagcactgctgccaaggtgcccaaaaaagcgaagacatggattcctgaagttcatgatcagaaagcagatgtgtcagcttggaaggacctgtttgttcccaggccggttctccgagcactcagctttctaggcttctctgcacccacaccaatccaagccctgaccttggcacctgccatccgtgacaaactggacatccttggggctgctgagacaggaagtgggaaaactcttgcctttgccatcccaatgattcatgcggtgttgcagtggcagaagaggaatgctgcccctcctccaagtaacaccgaagcaccacctggagagaccagaactgaggccggagctgagactagatcaccaggcaaggctgaagctgagtctgatgcattgcctgacgatactgtaattgagagtgaagcactgcccagtgatattgcagccgaggccagagccaagactggaggcactgtctcagaccaggcgttgctctttggtgacgatgatgctggtgaagggccttcttccctgatcagggagaaacctgttcccaaacagaatgagaatgaggaggaaaatcttgataaagagcagactggaaatctaaaacaggagttggatgacaaaagcgccacctgtaaggcatatccaaagcgtcctctgcttggactggttctgactcccactcgagagctggccgtccaggtcaaacagcacattgatgctgtggccaggtttacaggaattaaaactgctattttggttggtggaatgtccacgcagaaacagcagaggatgctgaaccgtcgtcctgagattgtggttgctactccaggccggctgtgggaattaattaaagaaaagcattatcatttgaggaaccttcggcagctcaggtgcctggtagtggatgaggctgaccggatggttgagaaaggccattttgctgagctctcacagctgctagagatgctcaatgactcccaatacaacccaaagagacaaacgcttgttttttctgccacactcaccctggtgcatcaggctcctgctcgaatccttcataagaagcacaccaagaaaatggataaaacagccaaacttgacctccttatgcagaaaattggcatgaggggcaagcccaaggtcattgacctcacaaggaatgaggccacggtggagacgctaacagagaccaagatccattgtgagactgatgagaaagacttctacttgtactacttcctgatgcagtatccaggccgcagcttagtgtttgccaacagtatctcctgcatcaaacgcctctctgggctcctcaaagtccttgatatcatgcccttgaccctgcatgcctgtatgcaccagaagcagaggctcagaaacctggagcagtttgcccgtctggaagactgtgttctcttggcaacagatgtggcagctcggggtctggatattcctaaagtccagcatgtcatccattaccaggtcccacgtacctcggagatttatgtccaccgaagtggtcgaactgctcgagctaccaatgaaggcctcagtctgatgctcattgggcctgaggatgtgatcaactttaagaagatttacaaaacgctcaagaaagatgaggatatcccactgttccccgtgcagacaaaatacatggatgtggtcaaggagcgaatccgtttagctcgacagattgagaaatctgagtatcggaacttccaggcttgcctgcacaactcttggattgagcaggcagcagctgccctggagattgagctggaagaagacatgtataagggaggaaaagctgaccagcaagaagaacgtcggagacaaaagcagatgaaggttctgaagaaggagctgcgccacctgctgtcccagccactgtttacggagagccagaaaaccaagtatcccactcagtctggcaagccgcccctgcttgtgtctgccccaagtaagagcgagtctgctttgagctgtctctccaagcagaagaagaagaagacaaagaagccgaaggagccacagccggaacagccacagccaagtacaagtgcaaattaactggtcaagtgtgtcagtgactgcacattggtttctgttctctggctatttgcaaaacctctcccacccttgtgtttcactccaccaccaaccccaggtaaaaaagtctccctctcttccactcacacccatagcgggagagacctcatgcagatttgcattgttttggagtaagaattcaatgcagcagcttaatttttctgtattgcagtgtttataggcttcttgtgtgttaaacttgatttcataaattaaaaacaatggtcagaaaaaaaaaaaaaaaaaaaa

SEQ ID NO: 376 - DNA, 324 bp, Artificial Sequence
  Description of Artificial sequences:primer
  misc_feature (1)..(324): 3' terminal sequence from clone image:208357.
  misc_feature (176)..(176): n is a, c, g, or t
  misc_feature (282)..(282): n is a, c, g, or t
  misc_feature (300)..(300): n is a, c, g, or t
  misc_feature (305)..(305): n is a, c, g, or t
  misc_feature (313)..(313): n is a, c, g, or t
acgttgctcaggctagtctcgaactcccgggctcaagcaaacctcagccttcagagtagctgggagcctgaggtgggaggatgacttgagcctagcaggttgaggctgcaacgagctgtgataatgccactgcgctccagcctgggaggcacactgagacattgcctcgaggaaanaaaaagaaaaaaaaaaaggacaagaacaatggctcacacacttgtaatcccagcactctgggaggctgaggccagctgagacaggtggattgcttgagctcagganttgaaggccagcctgggncaaantgacaaantccacctctac

SEQ ID NO: 377 - DNA, 419 bp, Artificial Sequence
  Description of Artificial sequences:primer
  misc_feature (1)..(419): 5' terminal sequence from clone image:208357.
  misc_feature (290)..(290): n is a, c, g, or t
taaaactgaaattcgtgctatatctgctgttttacaacacaatcttgtcagagattgtgctcttattctctttccttagagaatgctctttcttcagattgtcatagatcttgcttttccattttatttttattttttaattttttatttttttttcgtatttttaatagagctggggtttcaccatgttggctaggctggtcttgaactcttggccttaggtgatgtgcctgcctcagcctcctagagtgctgggattacagacatgagccactactccaggcctactntttgtattttttgtagaggtggattttgtcattttgtccaggctggtcttcaactcctgagctcaagcaatcccacctgtctcaggctgggcctcagcctcccagagtgtctgggattaacaagtgtgt

SEQ ID NO: 378 - DNA, 370 bp, Artificial Sequence
  Description of Artificial sequences:primer
  misc_feature (1)..(370): 3' terminal sequence from clone image:208413. hepsin (transmembrane protease, serine 1)(HPN) gene.
ttaatcaaaaccatctttattatttaaagagcatcccgtcatcaggggcacctagacaggagtcccagacagcagaacaatatttacatgggggtcaggagggtgaggttgggtggtctcggggctgagtgggcccgccactgtggaagagaggaccctggagggagggtgtccttggacctgtggaccgggcccaagaagaaaaacgtcccatcctaggcccagcgtggatcccaccaccgggatcacctcgggccctgggaggctgcgcaggagcaagccaccggtcagagctgggtcagcatgccgctggcttcggagtgagtctttatgggcctggaagattccactcccggaagtcaatgatttt

SEQ ID NO: 379 - DNA, 483 bp, Artificial Sequence
  Description of Artificial sequences:primer
  misc_feature (1)..(483): 5' terminal sequence from clone image:208413. hepsin (transmembrane protease, serine 1)(HPN) gene.
  misc_feature (34)..(34): n is a, c, g, or t
  misc_feature (37)..(37): n is a, c, g, or t
  misc_feature (159)..(159): n is a, c, g, or t
  misc_feature (369)..(369): n is a, c, g, or t
  misc_feature (379)..(379): n is a, c, g, or t
  misc_feature (394)..(394): n is a, c, g, or t
  misc_feature (402)..(402): n is a, c, g, or t
  misc_feature (414)..(414): n is a, c, g, or t
  misc_feature (433)..(433): n is a, c, g, or t
  misc_feature (445)..(445): n is a, c, g, or t
  misc_feature (451)..(451): n is a, c, g, or t
aaggacagcatctctcggacgccacgttggcgcntgntgtggcattgtgagttggggcactggctgtgcctgagcccagaagccaggcgtctacaccaaagtcagtgacttccgggagtggatcttccaggccataaagactcactccgaagccagcgnatgctgacccagctctgaccggtggcttctcgctgcgcagctccagggcccgaggtgatcccggtggtgggatccacgctgggcctaggatgggacgtttttcttcttgggcccggtccacaggtccaaggacaccctccctccagggtcctctcttccacagtgggcgggcccactcagccccgaagaccacccaacctgaaccttctngacccccatngtaaaatatttgttnttgttgtnttgggattcctnttttaaggtggcccttgantgaacgggatgntttttnaaataattaaagatggtttttgatttaaaaaa

SEQ ID NO: 380 - DNA, 1783 bp, Artificial Sequence
  Description of Artificial sequences:primer
  misc_feature (1)..(1783): hepsin (transmembrane protease, serine 1)(HPN) gene.
tcgagcccgctttccagggaccctacctgagggcccacaggtgaggcagcctggcctagcaggccccacgccaccgcctctgcctccaggccgcccgctgctgcggggccaccatgctcctgcccaggcctggagactgacccgaccccggcactacctcgaggctccgcccccacctgctggaccccagggtcccaccctggcccaggaggtcagccagggaatcattaacaagaggcagtgacatggcgcagaaggagggtggccggactgtgccatgctgctccagacccaaggtggcagctctcactgcggggaccctgctacttctgacagccatcggggcggcatcctgggccattgtggctgttctcctcaggagtgaccaggagccgctgtacccagtgcaggtcagctctgcggacgctcggctcatggtctttgacaagacggaagggacgtggcggctgctgtgctcctcgcgctccaacgccagggtagccggactcagctgcgaggagatgggcttcctcagggcactgacccactccgagctggacgtgcgaacggcgggcgccaatggcacgtcgggcttcttctgtgtggacgaggggaggctgccccacacccagaggctgctggaggtcatctccgtgtgtgattgccccagaggccgtttcttggccgccatctgccaagactgtggccgcaggaagctgcccgtggaccgcatcgtgggaggccgggacaccagcttgggccggtggccgtggcaagtcagccttcgctatgatggagcacacctctgtgggggatccctgctctccggggactgggtgctgacagccgcccactgcttcccggagcggaaccgggtcctgtcccgatggcgagtgtttgccggtgccgtggcccaggcctctccccacggtctgcagctgggggtgcaggctgtggtctaccacgggggctatcttccctttcgggaccccaacagcgaggagaacagcaacgatattgccctggtccacctctccagtcccctgcccctcacagaatacatccagcctgtgtgcctcccagctgccggccaggccctggtggatggcaagatctgtaccgtgacgggctggggcaacacgcagtactatggccaacaggccggggtactccaggaggctcgagtccccataatcagcaatgatgtctgcaatggcgctgacttctatggaaaccagatcaagcccaagatgttctgtgctggctaccccgagggtggcattgatgcctgccagggcgacagcggtggtccctttgtgtgtgaggacagcatctctcggacgccacgttggcggctgtgtggcattgtgagttggggcactggctgtgccctggcccagaagccaggcgtctacaccaaagtcagtgacttccgggagtggatcttccaggccataaagactcactccgaagccagcggcatggtgacccagctctgaccggtggcttctcgctgcgcagcctccagggcccgaggtgatcccggtggtgggatccacgctgggccgaggatgggacgtttttcttcttgggcccggtccacaggtccaaggacaccctccctccagggtcctctcttccacagtggcgggcccactcagccccgagaccacccaacctcaccctcctgacccccatgtaaatattgttctgctgtctgggactcctgtctaggtgcccctgatgatgggatgctctttaaataataaagatggttttgatt

SEQ ID NO: 381 - DNA, 390 bp, Artificial Sequence
  Description of Artificial sequences:primer
  misc_feature (1)..(390): 3' terminal sequence from clone image:209710. matrix gla protein(MGP) gene.
  misc_feature (14)..(14): n is a, c, g, or t
  misc_feature (223)..(223): n is a, c, g, or t
  misc_feature (308)..(308): n is a, c, g, or t
  misc_feature (311)..(311): n is a, c, g, or t
caccagaagtttantatggaacaatcacatatgttgactctcctttgaccctcactgcagtgcactttcattacttatcaatccgggggcgggaaaaaggggtgcagccagacaagagaatatacaggaaagaagcattgtatataagcctatgtatttcagtaatgctgctacagggggatacaaaatcaggtgccagcctccagaaaaaaagagatttttnttcttccctcagtctcatttggcccctcggcgcttcctgaagtagcgattataggcagcattgtatccataaaccatgggcgtangtntcgcaaagtctgtaggtcatcacaggcttccctattgaggctcgtgggacaggcttaggagcgttctcggatcccctct

SEQ ID NO: 382 - DNA, 603 bp, Artificial Sequence
  Description of Artificial sequences:primer
  misc_feature (1)..(603): matrix gla protein(MGP) gene.
cgtgctgctacacaagaaccctgagactgacctgcaggacgaaaccatgaagagcctgatccttcttgccatcctggccgccttagcggtagtaactttgtgttatgaatcacatgaaagcatggaatcttatgaacttaatcccttcattaacaggagaaatgcaaataccttcatatcccctcagcagagatggagagctaaagtccaagagaggatccgagaacgctctaagcctgtccacgagctcaatagggaagcctgtgatgactacagactttgcgaacgctacgccatggtttatggatacaatgctgcctataatcgctacttcaggaagcgccgaggggccaaatgagactgagggaagaaaaaaaatctctttttttctggaggctggcacctgattttgtatccccctgtagcagcattactgaaatacataggcttatatacaatgcttctttcctgtatattctcttgtctggctgcacccctttttcccgcccccagattgataagtaatgaaagtgcactgcagtgagggtcaaaggagagtcaacatatgtgattgttccataataaacttctggtgtgatactt

SEQ ID NO: 383 - DNA, 237 bp, Artificial Sequence
  Description of Artificial sequences:primer
  misc_feature (1)..(237): 3' terminal sequence from clone image:2106469. similar to riken cdna 4933405l10.
caaagacccagggcagggcagaggctagagcgccaggttgtgccatgtcgggccccacaggcagggggagaaggaacagtccagggactgccactcacgctccagcctcaatgtctctaagggtgcagacaccatgctggccacagcgtggagcacgggagcccccaggctcttgcgcttcttggcttttttggtgctgtttggcagatggtgagggctcacttctggctgtcctct

SEQ ID NO: 384 - DNA, 418 bp, Artificial Sequence
  Description of Artificial sequences:primer
  misc_feature (1)..(418): 3' terminal sequence from clone image:210698. erythrocyte membrane protein band 4.1 like 4b(EPB41L4B) gene.
  misc_feature (330)..(330): n is a, c, g, or t
  misc_feature (336)..(336): n is a, c, g, or t
  misc_feature (364)..(364): n is a, c, g, or t
  misc_feature (372)..(372): n is a, c, g, or t
  misc_feature (380)..(380): n is a, c, g, or t
aaatcagaacatcaatatgattcctgagcctttaccttcattttaatgagaatgcagtcaacagtaaattatgacaagctatagtggttttatcttcaaatatttacatggacaccaaaaacacctttcaggactactccttaaagacactcgtccaaacacatccatccatctgaggccaagacacttttcatgggaatgcaatgaaactatgaaggtgaatgggaagagagatgcttcagtctctcaaagtgcagtcatgagtttatctcggatacatcatactttggcatccctcctaaggttcttctgggttctgggtcgtggggncattanttcaaaatggggctggtccatcttccantgggccgntggctttnccgttgcgggcccgtccttcccgaaaggttggggccct

SEQ ID NO: 385 - DNA, 278 bp, Artificial Sequence
  Description of Artificial sequences:primer
  misc_feature (1)..(278): 5' terminal sequence from clone image:210698. erythrocyte membrane protein band 4.1 like 4b(EPB41L4B) gene.
  misc_feature (1)..(1): n is a, c, g, or t
  misc_feature (5)..(5): n is a, c, g, or t
  misc_feature (86)..(86): n is a, c, g, or t
  misc_feature (177)..(177): n is a, c, g, or t
  misc_feature (234)..(234): n is a, c, g, or t
nctgnatgctttacactttcgagttaaatactattcttcagaaccaaacaaccttcgtgaggagtttacaaggtacctgtttgttntacaactcaggcatgacattctttctggaaaattgaaatgcccttatgaaacagctgtggaattagctgctctctgtctacaagcggactngttggagtgcgagcttccagaacacacaccagagcttgtgtctgagtttcggttcantccaaatcagacagaagcaatggaatttgatatcttccagagat

SEQ ID NO: 386 - DNA, 5582 bp, Artificial Sequence
  Description of Artificial sequences:primer
  misc_feature (1)..(5582): erythrocyte membrane protein band 4.1 like 4b(EPB41L4B) gene.
caagccgccggcccggagagcgcgcggcggcggcggcggcgggacggccccgagcgcgccctccccgtgcggccactcgcagcggcgctggccgggccggcgcgcccgcaggcggctagagcagcggcctcggcctcggcgcgggcttgccccgggccgtagcccgcgagaggcggcgcgggcggccgagggcactgaacggcgtcgcggtacgctcccgggcggcggcgcagcggcagcggcagcggcagcggcagcgcagggggcggaggcagggggcgcccccagccaggatgctgcggttcctgcgccggacctttggccgccgctccatgcagcgctacgcggggcgcggcggggcgcggggccgccgggctgggggacgagcgcgatgggggccacgggggggcccggccgccgccgcctcctcctcggcgctgcccgccgcgcccgggggcagcgtgttcccggcgggcggcgggcccctgctcaccggcggcgcggccgtgcacatctccgccgccggcgccgccaaggccaccctctactgccgcgtcttcctgctcgacgggaccgaagtgagcgtggacctgccgaaacatgccaaaggccaggatttgtttgatcagattgtgtaccacttggaccttgtggaaacagattactttggcctccagttcctcgactctgcccaggttgcgcactggctggatcatgccaaacccataaaaaagcagatgaaaattggacctgcttatgctttacactttcgagttaaatactattcttcagaaccaaacaaccttcgtgaggagtttacaaggtacctgtttgttttacaactcaggcatgacattctttctggaaaattgaaatgcccttatgaaacagctgtggaattagctgctctctgtctacaagcggagcttggggagtgcgagcttccagaacacacaccagagcttgtgtctgagtttcggttcattccaaatcagacagaagcaatggaatttgatatcttccagagatggaaagagtgcaggggaaagagccctgcccaggcggaactctcctatctgaataaagcgaagtggctggaaatgtatggggtagacatgcacgttgtcaggggaagagatggctgtgaatattctcttggactgaccccgacaggcatattaatctttgaaggagctaacaaaataggcttattcttttggcctaaaattaccaaaatggattttaaaaagagcaaattgacactcgtggtggtcgaggatgatgatcagggacgtgagcaagagcacacgtttgtgttccggttagacagtgccaggacctgcaaacacctttggaagtgtgcagttgagcaccacgcattcttccgactgcggacgccaggaaacagcaaatccaatagatccgactttatcaggctgggctctcgcttcagattcagtgggcggacagaatatcaagctacacatggctccaggttacgaagaaccagcacctttgagaggaagcctagtaaacgttatccatcccggagacattcaacgttcaaagcaagcaacccagtgatagcagcccagctctgctctaaaacaaatccggaagtccataattaccagcctcaatatcatcctaatatccatcccagccagccccggtggcatcctcactctccaaatgtcagctacccgctcccttccccagtgcttagcagctcggaccggttgccttttggcattgaggagaatgggggcacaccgttcctcaccgcagcttcaggaaggcatcaccaccagcaccagcatcagcatcagcaccagcaccactcaaactacagcctctcactgaccctggagaacaaagaggggcctctgaggtccccaaactccagcagcaagtcccttacaaaactgagtccaggaacacctgccttgttcagtgaagccgctgcccatctaaagaagctggaactggaaactgtgaaggctgctggaccctggcctcctctgcacatcaacataaacaaggctgaagaaaagaaagtctcggagaaaactcttcagactccacttttgccttcccctgttgcggatcatgtgaagtgtaacattctgaaagcccagttggaaaatgcttcccgagtgaacatccagggtggaaaggaggaatcaccgtttgtaaatatcaataagaaatccagtcttcaggacgctagtgtaagaagtcctattcctattcgtgtggaaactgcccagccagctgtggaaaagccggaaatcaagcctccccgagtgaggaagttaacaagacagtatagttttgatgaagacgacctccctccagacctggccgaggcagtgggagtgaccacatctacaaccacaaacaccacaacggctgccacacaagtctccgtgccgctgccgtcccccaaggtccagaatgtcagctcgcctcacaagtcagaaggcaaaggcctgctgtcccctggggccaagagcccctctgaccgaggaggtgcctttaccctggagccgggtgatcttctgatggatttcacagaagccactcctctggcagagcccgccagcaacccccactgtgcccactctcgctgttctcctccactctctctccccatgaaggaagagaccactggagtttgcatgtaccctccaatcaaaacgaggctgataaaaacattcccggttgatacaatgaccccgtttcctgatactttcaccacagggccacagtttactgcagacttcagagacagtaaattacagtgctgtcctggcccgacttccccgctgatcccagcagcgaccctgaggcctttgacagagaccgtctccacagtgcagaccatttacaccaccccggaaacctgtttctctggcagccagtgcagagacactccggcaggaactggagagagagaagatgatgaaaagactgttgatgaccagactgtgaaattctccccttgtcacctggaagatggcatggtgccttctgtccatcttctttcttcgggctttgtgtgctcactctagcacagcatacaagtgtgtgctttgttcgcccaggtctccatggttagttgaagccaatttctggcttgacttttatgggaaaagttattttatgtctcctaagcattagagtttttctattactctatgtagttgagacaggatttgataagtctaggaaaagaaagatgggaaaacgggattccttttcagaagtacctgtgtgtatctgttaataaccacaggggttaatatgatgtaggatctttactatcaatttcaaccatttgattttgtatgattgaaacttgcaccgagctttgactgtttgttaaagagtcatttttaatgaaagaataattctttattgctggtttttcatttacactgataaatacacagatcttataaagtctttaacattcatttgtattcagatgtgagtagaagaactaaaaaaagaaagttacatatcactatgactgaaggtacttcagcttaatctgaaatataatttaacttgtgaactccttggatatgatattatttggaataaacagaatttatcattgaacccaaagtaggaaatgatagcttacattgtctaaaaatccttacaaggttaagatgattcaatatcaagaatattcagaaaattatttctaaagttgatcgattcatgtcgtattgatagaatcttgaccagaagaaattttgctctttttatatagtttcaagaaatgtgtttttaaatttttattaatgcacttgaacaactttgcaggaataaagcaaccccctaaccacaaaatatccctctaaattagttccctagctttctcaatgaatacacacatatttttacatagctatgatcgttgtgtacattctcctttgttttacttctcggcctaacacttgtctcctcttgtcaacacagattctgctctcaccaatttaaatgtctttatatccatgtaacatgggtaacctcacttcaccccattattagatatttgagttatatctaatttttcactcttataaatagtgctgctatgaatgtctgtaaaaaaaaaaaactgctccttcttttggattattcccttaggaatatctccaaagagggattacaaggtcaaagagcatgaagtattttatagctcttgttttatattgccagattgctttctagaaagatccaatctttgggttggaaggaccttaaaggtcatctagtttagcctccccaccccctctgaatgcttgaatcccctcgacaatttatgatgccaccagcaatgtataagcatttctgtttaccaatagctctgccagtattgggttttgccatttttatttatttttgctagtttaataggtatgtatagttgttcttgaagagttgttttatttcattaattgctagcaaggctgagcacttttccatgtgatgatttactagttgtatttccttgtgtgtaaaatgttcattcatttcttatgaccacttgttaagaggaactgatctcatatatttgtatcagaactgtatttttatgttatattgtatagtttgctctcctgcccctctccttaaaactgaatggtgccaataatttgatactaatgactacaaaaaaaggtaatgcctcatttactagtattgttgtaaaatgaggaatgtatgtgaatattcagataaccgaggattaaccctttaagtgctgaatctttaaaattttaatatatttttttttgagggaaatctttctaaaatgtattacgcacttccctgccttagtaaacagagtatactggagagtatttaaccttttcttgatgagtcatggtcatgattataaacatcagccccttttataccttggtacggtgcagtgatatcattaagagctatcaatatgtgtagggcttggcttggccttttataggatattatgctgttctcactgatggttttttactgctctctgctctgtcagtggagctatccggggcaattgtagcgtttgggtccttttacccctatgtcccccggctatacttttaaaacagctttagctgttctttatcttgtgcacatgatacaaaatatgttcccgtacaatatggggctgtcacttcttgccaacccagcaccctcttcctcttctaacctgctttctgaggcttctgctcttcacctcctgctcgctgatggaaacctccagggcaaagctgaaggtttcttggggaagccaggaaagccagtatttcctatgtgtcagatctgcttggcttccaagaagggatgcatgggctttttggccagtgtttccaggaggctctgggcttcctgcttcttccccgcttcccccagagttcacagatgttgaagtttctgaaggttgacgtcactggaagtctgaccacaaacaagttggctgttactgtatttgaaacccagtacctttggcagctcacctctaaccagtaaaataagaggattccatggtttctttttttttt

SEQ ID NO: 387 - DNA, 370 bp, Artificial Sequence
  Description of Artificial sequences:primer
  misc_feature (1)..(370): 3' terminal sequence from clone image:211433. ribosomal protein s4, x-linked(RPS4X) gene.
  misc_feature (21)..(21): n is a, c, g, or t
  misc_feature (29)..(29): n is a, c, g, or t
  misc_feature (87)..(87): n is a, c, g, or t
  misc_feature (124)..(124): n is a, c, g, or t
  misc_feature (159)..(159): n is a, c, g, or t
  misc_feature (184)..(184): n is a, c, g, or t
  misc_feature (214)..(214): n is a, c, g, or t
  misc_feature (265)..(265): n is a, c, g, or t
  misc_feature (279)..(279): n is a, c, g, or t
  misc_feature (327)..(327): n is a, c, g, or t
  misc_feature (336)..(336): n is a, c, g, or t
  misc_feature (364)..(364): n is a, c, g, or t
ccacaatatttttaattacgnacaaaganctgacatgtcacccagggacccatttcacccactgctctgtttggccgccagtctttngtctctctcttcagcaatggtgaggcggatacccttncctcggggaagagaaatccatggtttgttgccctngccaataacaaaaatgttggaaagncgagtggcaaagctgtttgccattggcatnctttcacgtgaaccacgtcaaaagatccaggggtgcctctctctgttgggngatcacaccaattnttcctagggttaggcacctccagtcaccatacacagggttaccaggtntcgaacttngaggaaatcagtaatcttggccagtttnccaatt

SEQ ID NO: 388 - DNA, 916 bp, Artificial Sequence
  Description of Artificial sequences:primer
  misc_feature (1)..(916): ribosomal protein s4, x-linked(RPS4X) gene.
aagacggaggtcctctttccttgcctaacgcagccatggctcgtggtcccaagaagcatctgaagcgggtggcagctccaaagcattggatgctggataaattgaccggtgtgtttgctcctcgtccatccaccggtccccacaagttgagagagtgtctccccctcatcattttcctgaggaacagacttaagtatgccctgacaggagatgaagtaaagaagatttgcatgcagcggttcattaaaatcgatggcaaggtccgaactgatataacctaccctgctggattcatggatgtcatcagcattgacaagacgggagagaatttccgtctgatctatgacaccaagggtcgctttgctgtacatcgtattacacctgaggaggccaagtacaagttgtgcaaagtgagaaagatctttgtgggcacaaaaggaatccctcatctggtgactcatgatgcccgcaccatccgctaccccgatcccctcatcaaggtgaatgataccattcagattgatttggagactggcaagattactgatttcatcaagttcgacactggtaacctgtgtatggtgactggaggtgctaacctaggaagaattggtgtgatcaccaacagagagaggcaccctggatcttttgacgtggttcacgtgaaagatgccaatggcaacagctttgccactcgactttccaacatttttgttattggcaagggcaacaaaccatggatttctcttccccgaggaaagggtatccgcctcaccattgctgaagagagagacaaaagactggcggccaaacagagcagtgggtgaaatgggtccctgggtgacatgtcagatctttgtacgtaattaaaaatattgtggcaggattaatagcaaaaaaaaaaaaaaaaaaaaaa

SEQ ID NO: 389 - DNA, 402 bp, Artificial Sequence
  Description of Artificial sequences:primer
  misc_feature (1)..(402): 3' terminal sequence from clone image:211445. insulin-like growth factor 2 (somatomedin a)(IGF2) gene.
  misc_feature (305)..(305): n is a, c, g, or t
  misc_feature (341)..(341): n is a, c, g, or t
  misc_feature (373)..(373): n is a, c, g, or t
  misc_feature (389)..(389): n is a, c, g, or t
ttttaaagccaatttctgagcttttgtggggtgtttctaaaaagccaattagttttaagagggttgttgtgggggggggggaagggggttagtttaatgttttgattttttatgtgtggggataattggggataatttggggggagggtatgtgaagggtgtttaaagccaatcgattttgtacatgtttgaagatgctgctgtgcttcctcagcccgatggagggggccgaggagagtagcctgtttcggggaggcggggcacggggactgggtcaggagaagccccaggggaacgtggaaccnagagattttcgggatggaacctgatggaaacgtccntggttcaggaggaggctgcaggatggtgggcnccgggctgcagacttncggcattttgctc

SEQ ID NO: 390 - DNA, 1356 bp, Artificial Sequence
  Description of Artificial sequences:primer
  misc_feature (1)..(1356): insulin-like growth factor 2 (somatomedin a)(IGF2) gene.
ttctcccgcaaccttcccttcgctccctcccgtcccccccagctcctagcctccgactccctccccccctcacgcccgccctctcgccttcgccgaaccaaagtggattaattacacgctttctgtttctctccgtgctgttctctcccgctgtgcgcctgcccgcctctcgctgtcctctctccccctcgccctctcttcggcccccccctttcacgttcactctgtctctcccactatctctgcccccctctatccttgatacaacagctgacctcatttcccgataccttttcccccccgaaaagtacaacatctggcccgccccagcccgaagacagcccgtcctccctggacaatcagacgaattctccccccccccccaaaaaaaaaagccatccccccgctctgccccgtcgcacattcggcccccgcgactcggccagagcggcgctggcagaggagtgtccggcaggagggccaacgcccgctgttcggtttgcgacacgcagcagggaggtgggcggcagcgtcgccggcttccagacaccaatgggaatcccaatggggaagtcgatgctggtgcttctcaccttcttggccttcgcctcgtgctgcattgctgcttaccgccccagtgagaccctgtgcggcggggagctggtggacaccctccagttcgtctgtggggaccgcggcttctacttcagcaggcccgcaagccgtgtgagccgtcgcagccgtggcatcgttgaggagtgctgtttccgcagctgtgacctggccctcctggagacgtactgtgctacccccgccaagtccgagagggacgtgtcgacccctccgaccgtgcttccggacaacttccccagataccccgtgggcaagttcttccaatatgacacctggaagcagtccacccagcgcctgcgcaggggcctgcctgccctcctgcgtgcccgccggggtcacgtgctcgccaaggagctcgaggcgttcagggaggccaaacgtcaccgtcccctgattgctctacccacccaagaccccgcccacgggggcgcccccccagagatggccagcaatcggaagtgagcaaaactgccgcaagtctgcagcccggcgccaccatcctgcagcctcctcctgaccacggacgtttccatcaggttccatcccgaaaatctctcggttccacgtccccctggggcttctcctgacccagtccccgtgccccgcctccccgaaacaggctactctcctcggccccctccatcgggctgaggaagcacagcagcatcttcaaacatgtacaaaatcgattggctttaaacacccttcacataccctcccccc

SEQ ID NO: 391 - DNA, 417 bp, Artificial Sequence
  Description of Artificial sequences:primer
  misc_feature (1)..(417): 3' terminal sequence from clone image:211920. ubiquitin a-52 residue ribosomal protein fusion product 1(UBA52) gene.
  misc_feature (59)..(59): n is a, c, g, or t
  misc_feature (61)..(61): n is a, c, g, or t
  misc_feature (126)..(126): n is a, c, g, or t
  misc_feature (132)..(132): n is a, c, g, or t
  misc_feature (314)..(314): n is a, c, g, or t
  misc_feature (374)..(374): n is a, c, g, or t
  misc_feature (414)..(414): n is a, c, g, or t
tttttttgctgctccagtcaatgaaagggacactttattgaggctccagggccacgggncngggcaggaggctgcccttcaaggaaagaacaaccttatttgaccttcttcttgggacgcaggttnttggtntgaccacacttcttcttgcggcagttgacagcacgagggtgaaggcgagcatagcacttgcggcagatcatcttgtcgcagttgtatttctgggcaagctggcggagagaaggctcaataatgccacctcgcaggcgcaacaccagggtccagggtggactctttctggatgttgtagtctnagagagtgcggccatcctccagctgtttgccggcaaatatcagacgctgctggtcaggtnggataccctccttgtcttgaattttgggttttgacattcncaa

SEQ ID NO: 392 - DNA, 428 bp, Artificial Sequence
  Description of Artificial sequences:primer
  misc_feature (1)..(428): 5' terminal sequence from clone image:211920. ubiquitin a-52 residue ribosomal protein fusion product 1(UBA52) gene.
  misc_feature (21)..(21): n is a, c, g, or t
  misc_feature (34)..(34): n is a, c, g, or t
  misc_feature (324)..(324): n is a, c, g, or t
  misc_feature (358)..(358): n is a, c, g, or t
  misc_feature (363)..(363): n is a, c, g, or t
  misc_feature (381)..(381): n is a, c, g, or t
  misc_feature (391)..(391): n is a, c, g, or t
  misc_feature (396)..(396): n is a, c, g, or t
  misc_feature (403)..(403): n is a, c, g, or t
  misc_feature (416)..(416): n is a, c, g, or t
gcggcggtcgtgcggacgaanacatgcagatctntgtgaagaccctcactggcaaaaccatcacccttgaggtcgagcccagtgacaccattgagaatgtcaaagccaaaattcaagacaaggagggtatcccacctgaccagcagcgtctgatatttgccggcaaacagctggaggatggccgcactctctcagactacaacatccagaaagagtccaccctgcacctggtgttgcgcctgcgaggtgggcattattgagccttctctccgccagcttgcccagaaatacaacttgcgacaagatgatctgccgcaagtgctnatgctcgcctttcaccctcgtgctgtcaactgancgcangaagaagtgtggtcacancaacaacctntgttnccaagancggaaggtttaantaaagggttgtt

SEQ ID NO: 393 - DNA, 515 bp, Artificial Sequence
  Description of Artificial sequences:primer
  misc_feature (1)..(515): ubiquitin a-52 residue ribosomal protein fusion product 1(UBA52) gene.
ttctttttcttcagcgaggcggccgagctgacgcaaacatgcagatctttgtgaagaccctcactggcaaaaccatcacccttgaggtcgagcccagtgacaccattgagaatgtcaaagccaaaattcaagacaaggagggtatcccacctgaccagcagcgtctgatatttgccggcaaacagctggaggatggccgcactctctcagactacaacatccagaaagagtccaccctgcacctggtgttgcgcctgcgaggtggcattattgagccttctctccgccagcttgcccagaaatacaactgcgacaagatgatctgccgcaagtgctatgctcgccttcaccctcgtgctgtcaactgccgcaagaagaagtgtggtcacaccaacaacctgcgtcccaagaagaaggtcaaataaggtggttctttccttgaagggcagcctcctgcccaggccccgtggccctggagcctcaataaagtgtccctttcattgactggagcagca

SEQ ID NO: 394 - DNA, 397 bp, Artificial Sequence
  Description of Artificial sequences:primer
  misc_feature (1)..(397): 5' terminal sequence from clone image:211995. aldo-keto reductase family 1, member c3 (3-alpha hydroxysteroid dehydrogenase, type ii)(AKR1C3) gene.
  misc_feature (370)..(370): n is a, c, g, or t
  misc_feature (385)..(385): n is a, c, g, or t
caaaatgataaaaatttattgtctttctggcctatggactcagctgtagttgactgaagtcgctaaacaggacggatttaagtagaggtgatatgtccagtcaccggcatagagacgtcctctgcgtcaccatccacacacagggcttctggtagacatcaggcaaagctctccatgttaatattcatctgaatatggataattagggtggctagcaaaagtatccactgttaaaatagtggagatttctgtctaggccatctatggctttcatgtcctctgcagtcaactggaactcaaaaacctgcacgttctgtctgatgcgctgctccattgtagctcttggccagggaccacaaccccacgttgncagctggtagcgcanggcaatcagggt

SEQ ID NO: 395 - DNA, 1224 bp, Artificial Sequence
  Description of Artificial sequences:primer
  misc_feature (1)..(1224): aldo-keto reductase family 1, member c3 (3-alpha hydroxysteroid dehydrogenase, type ii)(AKR1C3) gene.
gcccattgtttttgtaatctctgaggagaagcagcagcaaacatttgctagtcagacaagtgacagggaatggattccaaacaccagtgtgtaaagctaaatgatggccacttcatgcctgtattgggatttggcacctatgcacctccagaggttccgagaagtaaagctttggaggtcacaaaattagcaatagaagctgggttccgccatatagattctgctcatttatacaataatgaggagcaggttggactggccatccgaagcaagattgcagatggcagtgtgaagagagaagacatattctacacttcaaagctttggtccacttttcatcgaccagagttggtccgaccagccttggaaaactcactgaagaaagctcaattggactatgttgacctctatcttattcattctccaatgtctctaaagccaggtgaggaactttcaccaacagatgaaaatggaaaagtaatatttgacatagtggatctctgtaccacctgggaggccatggagaagtgtaaggatgcaggattggccaagtccattggggtgtcaaacttcaaccgcaggcagctggagatgatcctcaacaagccaggactcaagtacaagcctgtctgcaaccaggtagaatgtcatccgtatttcaaccggagtaaattgctagatttctgcaagtcgaaagatattgttctggttgcctatagtgctctgggatctcaacgagacaaacgatgggtggacccgaactccccggtgctcttggaggacccagtcctttgtgccttggcaaaaaagcacaagcgaaccccagccctgattgccctgcgctaccagctgcagcgtggggttgtggtcctggccaagagctacaatgagcagcgcatcagacagaacgtgcaggtttttgagttccagttgactgcagaggacatgaaagccatagatggcctagacagaaatctccactattttaacagtgatagttttgctagccaccctaattatccatattcagatgaatattaacatggagggctttgcctgatgtctaccagaagccctgtgtgtggatggtgacgcagaggacgtctctatgccggtgactggacatatcacctctacttaaatccgtcctgtttagcgacttcagtcaactacagctgagtccataggccagaaagacaataaatttttatcattttgaaataa

SEQ ID NO: 396 - DNA, 460 bp, Artificial Sequence
  Description of Artificial sequences:primer
  misc_feature (1)..(460): 3' terminal sequence from clone image:212414. retinoic acid receptor, beta(RARB) gene.
  misc_feature (14)..(15): n is a, c, g, or t
  misc_feature (17)..(17): n is a, c, g, or t
  misc_feature (62)..(62): n is a, c, g, or t
  misc_feature (174)..(174): n is a, c, g, or t
  misc_feature (177)..(177): n is a, c, g, or t
  misc_feature (181)..(181): n is a, c, g, or t
  misc_feature (184)..(185): n is a, c, g, or t
  misc_feature (246)..(246): n is a, c, g, or t
  misc_feature (249)..(249): n is a, c, g, or t
  misc_feature (278)..(278): n is a, c, g, or t
  misc_feature (308)..(308): n is a, c, g, or t
  misc_feature (353)..(353): n is a, c, g, or t
  misc_feature (378)..(378): n is a, c, g, or t
  misc_feature (383)..(383): n is a, c, g, or t
  misc_feature (422)..(422): n is a, c, g, or t
  misc_feature (428)..(428): n is a, c, g, or t
  misc_feature (450)..(450): n is a, c, g, or t
aaaataaatatatnncnccctttgcccggagactccatggaaaaaggtaaacagtatatgancatagaaagcattgttaaacaaacaatctcaatgtacaaacagagccagtgaaagtacatcacagacttgctaatatatcaaaaaaaaaaaattccactagtgcttaaatgnganctangannctgacacttgtatctgttaaccactctaccacagctttcactctgcttcatagtgattgancanggtcaaaggaggcagattctatgcctgtntgtttctttgggagttgttaatattaattnggccccttggcatcaaggaaggctgggaaaaaaaaaatcccaatntcagggcatggattcagggaagggncactnggggttacatgggtccgggtgggtaggaccagcccgctnattttnccctggaattttccccatgggntttggaacag

SEQ ID NO: 397 - DNA, 387 bp, Artificial Sequence
  Description of Artificial sequences:primer
  misc_feature (1)..(387): 5' terminal sequence from clone image:212414. retinoic acid receptor, beta(RARB) gene.
  misc_feature (2)..(2): n is a, c, g, or t
  misc_feature (4)..(4): n is a, c, g, or t
  misc_feature (27)..(27): n is a, c, g, or t
  misc_feature (31)..(31): n is a, c, g, or t
  misc_feature (360)..(360): n is a, c, g, or t
  misc_feature (377)..(377): n is a, c, g, or t
  misc_feature (384)..(384): n is a, c, g, or t
cnangacatcagtgctaaaggtgcggngtgntaattaccttgaaaatggaaattcctggatcaatgccacctctcattcaagaaatgctggagaattctgaaggacatgaacccttgaccccaagttcaagtgggaacacagcagagcacagtcctagcatctcacccagctcagtggaaaacagtggggtcagtcagtcaccactcgtgcaataagacattttctagctacttcaaacattccccagtaccttcagttccagggatttaaaatgcaagaaaaaacatttttactgctgcttagtttttgggactggaaaagatatttaaaacttcaaggaagggaccaaggaagttttncatatgtattcaatatnttattantcc

SEQ ID NO: 398 - DNA, 3119 bp, Artificial Sequence
  Description of Artificial sequences:primer
  misc_feature (1)..(3119): retinoic acid receptor, beta(RARB) gene.
gtgacagaagtagtaggaagtgagctgttcagaggcaggagggtctattctttgccaaaggggggaccagaattccccatgcgagctgtttgaggactgggatgccgagaacgcgagcgatccgagcagggtttgtctgggcaccgtcggggtaggatccggaacgcattcggaaggctttttgcaagcatttacttggaaggagaacttgggatctttctgggaaccccccgccccggctggattggccgagcaagcctggaaaatggtaaatgatcatttggatcaattacaggcttttagctggcttgtctgtcataattcatgattcggggctgggaaaaagaccaacagcctacgtgccaaaaaaggggcagagtttgatggagttgggtggacttttctatgccatttgcctccacacctagaggataagcacttttgcagacattcagtgcaagggagatcatgtttgactgtatggatgttctgtcagtgagtcctgggcaaatcctggatttctacactgcgagtccgtcttcctgcatgctccaggagaaagctctcaaagcatgcttcagtggattgacccaaaccgaatggcagcatcggcacactgctcaatcaattgaaacacagagcaccagctctgaggaactcgtcccaagccccccatctccacttcctccccctcgagtgtacaaaccctgcttcgtctgccaggacaaatcatcagggtaccactatggggtcagcgcctgtgagggatgtaagggctttttccgcagaagtattcagaagaatatgatttacacttgtcaccgagataagaactgtgttattaataaagtcaccaggaatcgatgccaatactgtcgactccagaagtgctttgaagtgggaatgtccaaagaatctgtcaggaatgacaggaacaagaaaaagaaggagacttcgaagcaagaatgcacagagagctatgaaatgacagctgagttggacgatctcacagagaagatccgaaaagctcaccaggaaactttcccttcactctgccagctgggtaaatacaccacgaattccagtgctgaccatcgagtccgactggacctgggcctctgggacaaattcagtgaactggccaccaagtgcattattaagatcgtggagtttgctaaacgtctgcctggtttcactggcttgaccatcgcagaccaaattaccctgctgaaggccgcctgcctggacatcctgattcttagaatttgcaccaggtataccccagaacaagacaccatgactttctcagacggccttaccctaaatcgaactcagatgcacaatgctggatttggtcctctgactgaccttgtgttcacctttgccaaccagctcctgcctttggaaatggatgacacagaaacaggccttctcagtgccatctgcttaatctgtggagaccgccaggaccttgaggaaccgacaaaagtagataagctacaagaaccattgctggaagcactaaaaatttatatcagaaaaagacgacccagcaagcctcacatgtttccaaagatcttaatgaaaatcacagatctccgtagcatcagtgctaaaggtgcagagcgtgtaattaccttgaaaatggaaattcctggatcaatgccacctctcattcaagaaatgctggagaattctgaaggacatgaacccttgaccccaagttcaagtgggaacacagcagagcacagtcctagcatctcacccagctcagtggaaaacagtggggtcagtcagtcaccactcgtgcaataagacattttctagctacttcaaacattccccagtaccttcagttccaggatttaaaatgcaagaaaaaacatttttactgctgcttagtttttggactgaaaagatattaaaactcaagaaggaccaagaagttttcatatgtatcaatatatatactcctcactgtgtaacttacctagaaatacaaacttttccaattttaaaaaatcagccatttcatgcaaccagaaactagttaaaagcttctattttcctctttgaacactcaagatgcatggcaaagacccagtcaaaatgatttacccctggttaagtttctgaagactttgtacatacagaagtatggctctgttctttctatactgtatgtttggtgctttccttttgtcttgcatactcaaaataaccatgacaccaaggttatgaaatagactactgtacacgtctacctaggttcaaaaagataactgtcttgctttcatggaatagtcaagacatcaaggtaaggaaacaggactattgacaggactattgtacagtatgacaagataaggctgaagatattctactttagttagtatggaagcttgtctttgctctttctgatgctctcaaactgcatcttttatttcatgttgcccagtaaaagtatacaaattccctgcactagcagaagagaattctgtatcagtgtaactgccagttcagttaatcaaatgtcatttgttcaattgttaatgtcactttaaattaaaagtggtttattacttgtttaatgacataactacacagttagttaaaaaaaatttttttacagtaatgatagcctccaaggcagaaacacttttcagtgttaagtttttgtttacttgttcacaagccattagggaaatttcatgggataattagcaggctggtctaccactggaccatgtaactctagtgtccttcctgattcatgcctgatattgggatttttttccagcccttcttgatgccaagggctaattatattacatcccaaagaaacaggcatagaatctgcctcctttgaccttgttcaatcactatgaagcagagtgaaagctgtggtagagtggttaacagatacaagtgtcagtttcttagttctcatttaagcactactggaatttttttttttgatatattagcaagtctgtgatgtactttcactggctctgtttgtacattgagattgtttgtttaacaatgctttctatgttcatatactgtttacctttttccatggactctcctggcaaagaataaaatatatttatttt

SEQ ID NO: 399 - DNA, 588 bp, Artificial Sequence
  Description of Artificial sequences:primer
  misc_feature (1)..(588): 3' terminal sequence from clone image:21626. monoglyceride lipase(MGLL) gene.
  misc_feature (47)..(47): n is a, c, g, or t
  misc_feature (79)..(79): n is a, c, g, or t
  misc_feature (162)..(162): n is a, c, g, or t
  misc_feature (186)..(186): n is a, c, g, or t
  misc_feature (216)..(216): n is a, c, g, or t
  misc_feature (225)..(225): n is a, c, g, or t
  misc_feature (228)..(228): n is a, c, g, or t
  misc_feature (235)..(235): n is a, c, g, or t
  misc_feature (246)..(246): n is a, c, g, or t
  misc_feature (270)..(271): n is a, c, g, or t
  misc_feature (273)..(273): n is a, c, g, or t
  misc_feature (279)..(279): n is a, c, g, or t
  misc_feature (281)..(281): n is a, c, g, or t
  misc_feature (319)..(319): n is a, c, g, or t
  misc_feature (327)..(327): n is a, c, g, or t
  misc_feature (347)..(347): n is a, c, g, or t
  misc_feature (353)..(353): n is a, c, g, or t
  misc_feature (414)..(414): n is a, c, g, or t
  misc_feature (427)..(427): n is a, c, g, or t
  misc_feature (443)..(443): n is a, c, g, or t
  misc_feature (474)..(474): n is a, c, g, or t
  misc_feature (500)..(500): n is a, c, g, or t
  misc_feature (517)..(517): n is a, c, g, or t
  misc_feature (523)..(523): n is a, c, g, or t
  misc_feature (531)..(531): n is a, c, g, or t
  misc_feature (537)..(537): n is a, c, g, or t
  misc_feature (554)..(554): n is a, c, g, or t
  misc_feature (573)..(573): n is a, c, g, or t
  misc_feature (586)..(586): n is a, c, g, or t
ttttttttgcaagccatatctgagaagccatctctgcccttcccctncctgcatcccccagaccatgagccgggcaccncaattgcattcagggtggggacgcagttcctgcccgtggctgtcctttgagagacccacatgtttatttcatggaagacgganttggtgacttcaggaagctccttntggagaacatggtaggcaccttcataaatnttgagagtnttntcctggntgttggctaantccatgagcaggtaggcccctttnntntcacanangcgatcggcagagcctgggagcagcaggaagggcacantcagcttngggagggcgcgttccacccntgaganggcattcagcagttggatgccgaagcacaactttcagccctgcccggcagatcagggggtntgagttataaatntcgaccttgaaagttnttgcagattcaggatttggcaagaaccagangcgaaatgagtaccatgccggcgaanttgcccggccttttttncggccntgaggatngccatnggcgcttcccattgganttggccagaaggaagacangaagccagggtantt

SEQ ID NO: 400 - DNA, 1582 bp, Artificial Sequence
  Description of Artificial sequences:primer
  misc_feature (1)..(1582): monoglyceride lipase(MGLL) gene.
ggcacgaggcttccccggtgcagacacccggcgaagcccacccggttttcccagcggcatttccgatgacagcttcggggctacgtgtcctgtgctgtcggagacgcacaggaagcaaagtttgtgagaagccttgggggcgactttgccttgggcacccgcatttgtgcgtctgcgaggtgcctcggtgtgcgcggagctagtttcccagtttcccgggcccctcccttctccgagcccctctagcgatttgtttaggaaaagtgatgacatgaactagtagtggagaatcgcagcgccgctccccgccctggggagggaggggagccccggagagcctgccggtgggagctggaagcaggctcccggctgagcgccccagcccgaaaggcagggtctgggtgcgggaagagggctcggagctgccttcctgctgccttggggccgcccagatgagggaacagcccgatttgcctggttctgattctccaggctgtcgtggttgtggaatgcaaacgccagcacataatggaaacaggacctgaagacccttccagcatgccagaggaaagttcccccaggcggaccccgcagagcattccctaccaggacctccctcacctggtcaatgcagacggacagtacctcttctgcaggtactggaaacccacaggcacacccaaggccctcatctttgtgtcccatggagccggagagcacagtggccgctatgaagagctggctcggatgctgatggggctggacctgctggtgttcgcccacgaccatgttggccacggacagagcgaaggggagaggatggtagtgtctgacttccacgttttcgtcagggatgtgttgcagcatgtggattccatgcagaaagactaccctgggcttcctgtcttccttctgggccactccatgggaggcgccatcgccatcctcacggccgcagagaggccgggccacttcgccggcatggtactcatttcgcctctggttcttgccaatcctgaatctgcaacaactttcaaggtccttgctgcgaaagtgctcaaccttgtgctgccaaacttgtccctcgggcccatcgactccagcgtgctctctcggaataagacagaggtcgacatttataactcagaccccctgatctgccgggcagggctgaaggtgtgcttcggcatccaactgctgaatgccgtctcacgggtggagcgcgccctccccaagctgactgtgcccttcctgctgctccagggctctgccgatcgcctatgtgacagcaaaggggcctacctgctcatggagttagccaagagccaggacaagactctcaagatttatgaaggtgcctaccatgttctccacaaggagcttcctgaagtcaccaactccgtcttccatgaaataaacatgtgggtctctcaaaggacagccacggcaggaactgcgtccccaccctgaatgcattggccggtgcccggctcatggtctgggggatgcaggcaggggaagggcagagatggcttctcagatatggcttgcaaaaaaaaaaaaaaaaaaaaaaaaaaaaaaa

SEQ ID NO: 401 - DNA, 423 bp, Artificial Sequence
  Description of Artificial sequences:primer
  misc_feature (1)..(423): 5' terminal sequence from clone image:22295. v-crk sarcoma virus ct10 oncogene homolog (avian)(CRK) gene.
  misc_feature (132)..(132): n is a, c, g, or t
  misc_feature (250)..(250): n is a, c, g, or t
  misc_feature (290)..(290): n is a, c, g, or t
  misc_feature (325)..(325): n is a, c, g, or t
  misc_feature (332)..(332): n is a, c, g, or t
  misc_feature (409)..(409): n is a, c, g, or t
  misc_feature (416)..(416): n is a, c, g, or t
ctgcctccgcctcagtatcggctctgattggaggtaaccaggagggttcccacccacagccacctgggtggcccggagcctggggcctatgccaacccagcgtcaacactccgctccctaacctccagaatnggcccatatatgccagggttatccagaagcgagtccccaatgcctacgacaagacagccttggttttggaggtcggtgagctggtaaaggttacgaagattaatgtgagtggtcagtnggaaggggagtgtaatggcaaacgaggtcacttcccattnacacatgtccgtctgctgggatcaacagaatcccnatgaggnctttcagctgagtatagttcaacagtttttgcttgacagatggggaacaatctttttttttttttttcccaactggnccatctntacaatt

SEQ ID NO: 402 - DNA, 1553 bp, Artificial Sequence
  Description of Artificial sequences:primer
  misc_feature (1)..(1553): v-crk sarcoma virus ct10 oncogene homolog (avian)(CRK) gene.
gaattccgaagctgaaaccggagccggtccgctgggcggcgggcgccgggggccggaggggcgcgcgcggcggcggcaccccagcgtttaggcgcggaggcagccatggcgggcaacttcgactcggaggagcggagtagctggtactgggggcggttgagtcggcaggaggcggtggcgctgctgcagggccagcggcacggggtgttcctggtgcgggactcgagcaccagccccggggactatgtgctcagcgtctcagagaactcgcgcgtctcccactacatcatcaacagcagcggcccgcgcccgccggtgccaccgtcgcccgcccagcctccgcccggggtgagcccctccagactccgaataggagatcaagagtttgattcattgcctgctttactggaattctacaaaatacactattgggacactacaacgttgatagaaccagtttccagatccaggcagggtagtggagtgattctcaggcaggaggaggcggagtatgtgcgagccctctttgactttaatgggaatgatgaggaagatcttccctttaagaaaggagacatcttgagaatccgggacaagcctgaagagcagtggtggaatgcggaggacagcgaaggcaagagagggatgattccagtcccttacgtcgagaagtatagacctgcctccgcctcagtatcggctctgattggaggtaaccaggagggttcccacccacagccactgggccccccggagcctggcccctatgcccaacccagcgtcaacactccgctccctaacctccagaatgggcccatatatgccagggttatccagaagcgagtccccaatgcctacgacaagacagccttggctttggaggtcggtgagctggtaaaggttacgaagattaatgtgagtggtcagtgggaaggggggtgtaatggcaaacgaggtcacttcccattcacacatgtccgtctgctggatcaacagaatcccgatgaggacttcagctgagtatagttcaacagttttgctgacagatgggaacaatcttttttttttttttttccaactgccatctatacaattttcttacagatgtcaaaagcagtctagtttatataagcattctgttacctgtgatattttttagactgaactgctccattcctagtcttaattaccatattcagggtacgaactggagggcttgtgtgttagcttctgaattggcaattggaggcggtagtggtcgtgcctgtgtgtatcagaagggataggtatcttgcctcctttctctcaggcagtgcaaatcaccctgtggaaaaccgatggacaggaaggagtgttacacactgcttaccctgatttattcagtggttttgttttcattctggaaccatactatcaaatggcgacagactgttccgttccacccccgtgaagagtaatcatgcaccgtgtgaatagtatcaagcaggattgctttcattgtatggagcgtgaccagggtatgactcattctgacattcagatcctaagaattc

SEQ ID NO: 403 - DNA, 639 bp, Artificial Sequence
  Description of Artificial sequences:primer
  misc_feature (1)..(639): 3' terminal sequence from clone image:2266576. laminin, alpha 3(LAMA3) gene.
ttttttttttttttttttttttttttaaggactacactgcattttttaattccataaattataatcctttaacatatatgaaagtttcatattcttaaagggctttaaaatatatttaatttttttaacaaggggaaaagaatgtttcttaaaagacatttaattttttaggggaaattaatattaccaaaaacattctgtgcataacaatttgaataacaatttttttatcttcaagaaatgggatttttatataaaatacacatgtagcactgaatgccaaagtgatgggtatccatggtcagaattcaaaattagattcgctattaaacctgtctggtttgtgtcctaattgaagaatgatctcgagctggggagggaggtgcattgggtaatcagtgcttttgaaggtgaatttccttgctgtgaaataggcttgggttactggtcaggacaaccattcagactgacaggcccctggacttccaaggcttcagtgacagggaccgggatgtgattgacatgaatattcctcagacagccaaagaatgatttccacacagggatccttagtgcgtcaaattggctggaacacctccaaggtgatgggttctgagtgcttgcagggtggaaagggat

SEQ ID NO: 404 - DNA, 5433 bp, Artificial Sequence
  Description of Artificial sequences:primer
  misc_feature (1)..(5433): laminin, alpha 3(LAMA3) gene.
atgggatggctgtggatctttggggcagccctggggcagtgtctgggctacagttcacagcagcaaagggtgccatttcttcagcctcccggtcaaagtcaactgcaagcgagttatgtggagtttagacccagccagggttgtagccctggatactatcgggatcataaaggcttgtataccggacggtgtgttccctgcaattgcaacggacattcaaatcaatgccaggatggctcaggcatatgtgttaactgtcagcacaacaccgcgggagagcactgtgaacgctgccaggagggctactatggcaacgccgtccacggatcctgcagggcctgcccatgtcctcacactaacagctttgccactggctgtgtggtgaatgggggagacgtgcggtgctcctgcaaagctgggtacacaggaacacagtgtgaaaggtgtgcaccgggatatttcgggaatccccagaaattcggaggtagctgccaaccatgcagttgtaacagcaatggccagctgggcagctgtcatcccctgactggagactgcataaaccaagaacccaaagatagcagccctgcagaagaatgtgatgattgcgacagctgtgtgatgaccctcctgaacgacctggccaccatgggcgagcagctccgcctggtcaagtctcagctgcagggcctgagtgccagcgcagggcttctggagcagatgaggcacatggagacccaggccaaggacctgaggaatcagttgctcaactaccgttctgccatttcaaatcatggatcaaaaatagaaggcctggaaagagaactgactgatttgaatcaagaatttgagactttgcaagaaaaggctcaagtaaattccagaaaagcacaaacattaaacaacaatgttaatcgggcaacacaaagcgcaaaagaactggatgtgaagattaaaaatgtcatccggaatgtgcacattcttttaaagcagatctctgggacagatggagagggaaacaacgtgccttcaggtgacttttccagagagtgggctgaagcccagcgcatgatgagggaactgcggaacaggaactttggaaagcacctcagagaagcagaagctgataaaagggagtcgcagctcttgctgaaccggataaggacctggcagaaaacccaccagggggagaacaatgggcttgctaacagtatccgggattctttaaatgaatacgaagccaaactcagtgaccttcgtgctcggctgcaggaggcagctgcccaagccaagcaggcaaatggcttgaaccaagaaaacgagagagctttgggagccattcagagacaagtgaaagaaataaattccctgcagagtgatttcaccaagtatctaaccactgcagactcatctttgttgcaaaccaacattgcgctgcagctgatggagaaaagccagaaggaatatgaaaaattagctgccagtttaaatgaagcaagacaagaactaagtgacaaagtaagagaactttccagatctgctggcaaaacatcccttgtggaggaggcagaaaagcacgcgcggtccttacaagagctggcaaagcagctggaagagatcaagagaaacgccagcggggatgagctggtgcgctgtgctgtggatgccgccaccgcctacgagaacatcctcaatgccatcaaagcggccgaggacgcagccaacagggctgccagtgcatctgaatctgccctccagacagtgataaaggaagatctgccaagaaaagctaaaaccctgagttccaacagtgataaactgttaaatgaagccaagatgacacaaaagaagctaaagcaagaagtcagtccagctctcaacaacctacagcaaaccctgaatattgtgacagttcagaaagaagtgatagacaccaatctcacaactctccgagatggtcttcatgggatacagagaggtgatattgatgctatgatcagtagtgcaaagagcatggtcagaaaggccaacgacatcacagatgaggttctggatgggctcaaccccatccagacagatgtggaaagaattaaggacacctatgggaggacacagaacgaagacttcaaaaaggctctgactgatgcagataactcggtgaataagttaaccaacaaactacctgatctttggcgcaagattgaaagtatcaaccaacagctgttgcccttgggaaacatctctgacaacatggacagaatacgagaactaattcagcaggccagagatgctgccagtaaggttgctgtccccatgaggttcaatggtaaatctggagtcgaagtccgactgccaaatgacctggaagatttgaaaggatatacatctctgtccttgtttctccaaaggcccaactcaagagaaaatgggggtactgagaatatgtttgtgatgtaccttggaaataaagatgcctcccgggactacatcggcatggcagttgtggatggccagctcacctgtgtctacaacctgggggaccgtgaggctgaactccaagtggaccagatcttgaccaagagtgagactaaggaggcagttatggatcgggtgaaatttcagagaatttatcagtttgcaaggcttaattacaccaaaggagccacatccagtaaaccagaaacacccggagtctatgacatggatggtagaaatagcaatacactccttaatttggatcctgaaaatgttgtattttatgttggaggttacccacctgattttaaacttcccagtcgactaagtttccctccatacaaaggttgtattgaattagatgacctcaatgaaaatgttctgagcttgtacaacttcaaaaaaacattcaatctcaacacaactgaagtggagccttgtagaaggaggaaggaagagtcagacaaaaattattttgaaggtacgggctatgctcgagttccaactcaaccacatgctcccatcccaacctttggacagacaattcagaccaccgtggatagaggcttgctgttctttgcagaaaacggggatcgcttcatatctctaaatatagaagatggcaagctcatggtgagatacaaactgaattcagagctaccaaaagagagaggagttggagacgccataaacaacggcagagaccattcgattcagatcaaaattggaaaactccaaaagcgtatgtggataaatgtggacgttcaaaacactataattgatggtgaagtatttgatttcagcacatattatctgggaggaattccaattgcaatcagggaaagatttaacatttctacgcctgctttccgaggctgcatgaaaaatttgaagaaaaccagtggtgtcgttagattgaatgatactgtgggagtaaccaaaaagtgctcggaagactggaagcttgtgcgatctgcctcattctccagaggaggacaattgagtttcactgatttgggcttaccacctactgaccacctccaggcctcatttggatttcagacctttcaacccagtggcatattattagatcatcagacatggacaaggaacctgcaggtcactctggaagatggttacattgaattgagcaccagcgatagcggcggcccaatttttaaatctccacagacgtatatggatggtttactgcattatgtatctgtaataagcgacaactctggactacggcttctcatcgatgaccagcttctgagaaatagcaaaaggctaaaacacatttcaagttcccggcagtctctgcgtctgggcgggagcaattttgagggttgtattagcaatgtttttgtccagaggttatcactgagtcctgaagtcctagatttgaccagtaactctctcaagagagatgtgtccctgggaggctgcagtttaaacaaaccaccttttctaatgttgcttaaaggttctaccaggtttaacaagaccaagacttttcgtatcaaccagctgttgcaggacacaccagtggcctccccaaggagcgtgaaggtgtggcaagatgcttgctcaccacttcccaagacccaggccaatcatggagccctccagtttggggacattcccaccagccacttgctattcaagcttcctcaggagctgctgaaacccaggtcacagtttgctgtggacatgcagacaacatcctccagaggactggtgtttcacacgggcactaagaactcctttatggctctttatctttcaaaaggacgtctggtctttgcactggggacagatgggaaaaaattgaggatcaaaagcaaggagaaatgcaatgatgggaaatggcacacggtggtgtttggccatgatggggaaaaggggcgcttggttgtggatggactgagggcccgggagggaagtttgcctggaaactccaccatcagcatcagagcgccagtttacctgggatcacctccatcagggaaaccaaagagcctccccacaaacagctttgtgggatgcctgaagaactttcagctggattcaaaacccttgtataccccttcttcaagcttcggggtgtcttcctgcttgggtggtcctttggagaaaggcatttatttctctgaagaaggaggtcatgtcgtcttggctcactctgtattgttggggccagaatttaagcttgttttcagcatccgcccaagaagtctcactgggatcctaatacacatcggaagtcagcccgggaagcacttatgtgtttacctggaggcaggaaaggtcacggcctctatggacagtggggcaggtgggacctcaacgtcggtcacaccaaagcagtctctgtgtgatggacagtggcactcggtggcagtcaccataaaacaacacatcctgcacctggaactggacacagacagtagctacacagctggacagatccccttcccacctgccagcactcaagagccactacaccttggaggtgctccagccaatttgacgacactgaggatccctgtgtggaaatcattctttggctgtctgaggaatattcatgtcaatcacatccctgtccctgtcactgaagccttggaagtccaggggcctgtcagtctgaatggttgtcctgaccagtaacccaagcctatttcacagcaaggaaattcaccttcaaaagcactgattacccaatgcacctccctccccagctcgagatcattcttcaattaggacacaaaccagacaggtttaatagcgaatctaattttgaattctgaccatggatacccatcactttggcattcagtgctacatgtgtattttatataaaaatcccatttcttgaagataaaaaaattgttattcaaattgttatgcacagaatgtttttggtaatattaatttccactaaaaaattaaatgtctttt

SEQ ID NO: 405 - DNA, 471 bp, Artificial Sequence
  Description of Artificial sequences:primer
  misc_feature (1)..(471): 3' terminal sequence from clone image:2272404. zinc finger, dhhc domain containing 1(ZDHHC1) gene.
aaaagtgaaaaattcttcgatagatgggctaatgctctctctactgtttctccctctggagatgaacatctgcaacaagccctccaacaagacggcccctgagaagagtgtgtggacggcaccggcacagcccagcggaccctcccctgagctgcagggccagcgatcccgccggaatgggtggagctggccccctcacccgctccagattgtggcctggctgctgtacctcttctttgctgtgatcggctttgggatccttgttcccctcctgcctcaccactgggtgcccgctggctacgctgtatccttgggaaagcgtagggctggtgtgtggaagtggggaggcaaaggatggctggcacagcggaggcccaaagccgggttgagagccttggggagcacagtcaggagagtggagcagggtgggcccagtcctggggacttgctgcttcccagcctgtctccagc

SEQ ID NO: 406 - DNA, 2049 bp, Artificial Sequence
  Description of Artificial sequences:primer
  misc_feature (1)..(2049): zinc finger, dhhc domain containing 1(ZDHHC1) gene.
gccggacgaggcccagccagtctgggtctggcctggccgcccctccagcctgctggagccggagccggagccggagccggagccagagccagagctcgaggactcaccggcccagtctccgtccgggatggggccccgctcccgggcgcgttgccgcccagtcccggggaccgtccctaccgcgagggtctgaggcgcggctgccccggggagggtggaaggccaggcgtggggcccgaacctctggctgactttggcagggcccatctggcacggcctccgcggcgcgcagctgttttcaagtcagcaaacatttactgaggatctactatgtacaagatgaacatctgcaacaagccctccaacaagacggcccctgagaagagtgtgtggacggcaccggcacagcccagcggaccctcccctgagctgcagggccagcgatcccgccggaatgggtggagctggccccctcacccgctccagattgtggcctggctgctgtacctcttctttgctgtgatcggctttgggatccttgttcccctcctgcctcaccactgggtgcccgctggctacgcttgcatgggcgccatctttgctggccaccttgtggtgcacctgaccgccgtctccatcgatccagcagatgccaacgtgcgggacaagagctatgcggggcccctgcccatcttcaaccgaagccagcacgcacatgtcattgaagacctgcactgcaacttgtgcaacgtggatgtgagcgctcgctccaagcactgcagcgcctgcaacaagtgcgtgtgcggtttcgaccaccactgcaagtggctcaacaactgtgtgggcgagcggaactaccggctctttctacacagtgttgcatccgctttactgggcgtcctgctcctggtgctggtggccacatatgtcttcgtggagttctttgtcaaccccatgcgtctgcgcaccaaccgacactttgaagtcctgaagaatcacacggatgtgtggttcgtgttcctgcctgccgcccccgtggagacccaggcccctgccatcctggccctggccgccctgctcatccttctgggcctcctgtccacagccctcctggggcacctgctctgcttccacatttatctcatgtggcacaagctcaccacctatgagtacatcgtgcagcaccgcccaccacaggaggccaagggggttcacagggagctcgagtcatgtcctcccaagatgcggcccattcaggagatggagttctacatgcggaccttcagacatatgcgcccagagccccctggccaggccgggccagcagcagtgaatgccaaacactctcgccctgcctccccggatccgaccccaggtaggagggactgtgctgggcctccggtccaggtggagtgggatagaaagaagcctctaccctggcgctcgcctctgcttcttttggcgatgtggggccctcaggctcccccgtgtctctgcagaaaaagaggaagaggcgcgtgtataaagtgcgaacgtctgagacctcggatccggcgtcggggcctagggcccccagccgccgctccagctcgtcgacggattccgcggacgccagccctgtgcacgccgctggccctgccggcgcctaccactcggcgtcggcagagtccgtggacgagattccagtggcgcagacgcgcctgggcagcgccgctctggccgccccgcggggccggggccgacagcccacgctggcgcggcaggcgcgtgcgcccgccgttttcgtgagcccgagcagcggcgagcccagggcgccgggcggccgggaggctggtctggcttagctgggccgagaggccggagggccgagttagagcggccggcctgactctctatgcaacaccccatccttgccgcaccgagtgcactttaggggcccctacggccggcgggatcggcctccctcccccacgactcagcaatacccgccccaccggctgtgatgctccaataaacttttttatgctttaaaaaaaaaaaaaaaaaaaa

SEQ ID NO: 407 - DNA, 372 bp, Artificial Sequence
  Description of Artificial sequences:primer
  misc_feature (1)..(372): 3' terminal sequence from clone image:232714. b-cell cll/lymphoma 2(BCL2) gene.
  misc_feature (6)..(6): n is a, c, g, or t
  misc_feature (152)..(152): n is a, c, g, or t
  misc_feature (164)..(164): n is a, c, g, or t
  misc_feature (211)..(211): n is a, c, g, or t
  misc_feature (229)..(229): n is a, c, g, or t
  misc_feature (236)..(236): n is a, c, g, or t
  misc_feature (304)..(304): n is a, c, g, or t
gtgggnctgtgttgaaacaggccacgtaaagcaactctctaaaggtcaaaccaccatagatttgaatctgctggtcattcgccatctggatttttaactgaatgaatctcatgggtttaaccaaacatgcatgtaatcctgaataccatganttaaatgcgganttgcccagggacgaggaaaccttcaagaaacaaggtcaaagggacancagatataactgtcacantaaacanttctgttgacgtgggaaatgcacatgacttggttgaaacaaagctcctcagtgggccagtgacatccngggtttttcttagggtaggctgaggactcaggggcttatctcaccttctcaggaatgctttttgaagg

SEQ ID NO: 408 - DNA, 6030 bp, Artificial Sequence
  Description of Artificial sequences:primer
  misc_feature (1)..(6030): b-cell cll/lymphoma 2(BCL2) gene.
gttggcccccgttacttttcctctgggaaatatggcgcacgctgggagaacagggtacgataaccgggagatagtgatgaagtacatccattataagctgtcgcagaggggctacgagtgggatgcgggagatgtgggcgccgcgcccccgggggccgcccccgcgccgggcatcttctcctcgcagcccgggcacacgccccatacagccgcatcccgggacccggtcgccaggacctcgccgctgcagaccccggctgcccccggcgccgccgcggggcctgcgctcagcccggtgccacctgtggtccacctgaccctccgccaggccggcgacgacttctcccgccgctaccgccgcgacttcgccgagatgtccaggcagctgcacctgacgcccttcaccgcgcggggacgctttgccacggtggtggaggagctcttcagggacggggtgaactgggggaggattgtggccttctttgagttcggtggggtcatgtgtgtggagagcgtcaaccgggagatgtcgcccctggtggacaacatcgccctgtggatgactgagtacctgaaccggcacctgcacacctggatccaggataacggaggctgggatgcctttgtggaactgtacggccccagcatgcggcctctgtttgatttctcctggctgtctctgaagactctgctcagtttggccctggtgggagcttgcatcaccctgggtgcctatctgggccacaagtgaagtcaacatgcctgccccaaacaaatatgcaaaaggttcactaaagcagtagaaataatatgcattgtcagtgatgttccatgaaacaaagctgcaggctgtttaagaaaaaataacacacatataaacatcacacacacagacagacacacacacacacaacaattaacagtcttcaggcaaaacgtcgaatcagctatttactgccaaagggaaatatcatttattttttacattattaagaaaaaaagatttatttatttaagacagtcccatcaaaactcctgtctttggaaatccgaccactaattgccaagcaccgcttcgtgtggctccacctggatgttctgtgcctgtaaacatagattcgctttccatgttgttggccggatcaccatctgaagagcagacggatggaaaaaggacctgatcattggggaagctggctttctggctgctggaggctggggagaaggtgttcattcacttgcatttctttgccctgggggctgtgatattaacagagggagggttcctgtggggggaagtccatgcctccctggcctgaagaagagactctttgcatatgactcacatgatgcatacctggtgggaggaaaagagttgggaacttcagatggacctagtacccactgagatttccacgccgaaggacagcgatgggaaaaatgcccttaaatcataggaaagtatttttttaagctaccaattgtgccgagaaaagcattttagcaatttatacaatatcatccagtaccttaagccctgattgtgtatattcatatattttggatacgcaccccccaactcccaatactggctctgtctgagtaagaaacagaatcctctggaacttgaggaagtgaacatttcggtgacttccgcatcaggaaggctagagttacccagagcatcaggccgccacaagtgcctgcttttaggagaccgaagtccgcagaacctgcctgtgtcccagcttggaggcctggtcctggaactgagccggggccctcactggcctcctccagggatgatcaacagggcagtgtggtctccgaatgtctggaagctgatggagctcagaattccactgtcaagaaagagcagtagaggggtgtggctgggcctgtcaccctggggccctccaggtaggcccgttttcacgtggagcatgggagccacgacccttcttaagacatgtatcactgtagagggaaggaacagaggccctgggcccttcctatcagaaggacatggtgaaggctgggaacgtgaggagaggcaatggccacggcccattttggctgtagcacatggcacgttggctgtgtggccttggcccacctgtgagtttaaagcaaggctttaaatgactttggagagggtcacaaatcctaaaagaagcattgaagtgaggtgtcatggattaattgacccctgtctatggaattacatgtaaaacattatcttgtcactgtagtttggttttatttgaaaacctgacaaaaaaaaagttccaggtgtggaatatgggggttatctgtacatcctggggcattaaaaaaaaaatcaatggtggggaactataaagaagtaacaaaagaagtgacatcttcagcaaataaactaggaaatttttttttcttccagtttagaatcagccttgaaacattgatggaataactctgtggcattattgcattatataccatttatctgtattaactttggaatgtactctgttcaatgtttaatgctgtggttgatatttcgaaagctgctttaaaaaaatacatgcatctcagcgtttttttgtttttaattgtatttagttatggcctatacactatttgtgagcaaaggtgatcgttttctgtttgagatttttatctcttgattcttcaaaagcattctgagaaggtgagataagccctgagtctcagctacctaagaaaaacctggatgtcactggccactgaggagctttgtttcaaccaagtcatgtgcatttccacgtcaacagaattgtttattgtgacagttatatctgttgtccctttgaccttgtttcttgaaggtttcctcgtccctgggcaattccgcatttaattcatggtattcaggattacatgcatgtttggttaaacccatgagattcattcagttaaaaatccagatggcaaatgaccagcagattcaaatctatggtggtttgacctttagagagttgctttacgtggcctgtttcaacacagacccacccagagccctcctgccctccttccgcgggggctttctcatggctgtccttcagggtcttcctgaaatgcagtggtgcttacgctccaccaagaaagcaggaaacctgtggtatgaagccagacctccccggcgggcctcagggaacagaatgatcagacctttgaatgattctaatttttaagcaaaatattattttatgaaaggtttacattgtcaaagtgatgaatatggaatatccaatcctgtgctgctatcctgccaaaatcattttaatggagtcagtttgcagtatgctccacgtggtaagatcctccaagctgctttagaagtaacaatgaagaacgtggacgcttttaatataaagcctgttttgtcttctgttgttgttcaaacgggattcacagagtatttgaaaaatgtatatatattaagaggtcacgggggctaattgctggctggctgccttttgctgtggggttttgttacctggttttaataacagtaaatgtgcccagcctcttggccccagaactgtacagtattgtggctgcacttgctctaagagtagttgatgttgcattttccttattgttaaaaacatgttagaagcaatgaatgtatataaaagcctcaactagtcatttttttctcctcttcttttttttcattatatctaattattttgcagttgggcaacagagaaccatccctattttgtattgaagagggattcacatctgcatcttaactgctctttatgaatgaaaaaacagtcctctgtatgtactcctctttacactggccagggtcagagttaaatagagtatatgcactttccaaattggggacaagggctctaaaaaaagccccaaaaggagaagaacatctgagaacctcctcggccctcccagtccctcgctgcacaaatactccgcaagagaggccagaatgacagctgacagggtctatggccatcgggtcgtctccgaagatttggcaggggcagaaaactctggcaggcttaagatttggaataaagtcacagaatcaaggaagcacctcaatttagttcaaacaagacgccaacattctctccacagctcacttacctctctgtgttcagatgtggccttccatttatatgtgatctttgttttattagtaaatgcttatcatctaaagatgtagctctggcccagtgggaaaaattaggaagtgattataaatcgagaggagttataataatcaagattaaatgtaaataatcagggcaatcccaacacatgtctagctttcacctccaggatctattgagtgaacagaattgcaaatagtctctatttgtaattgaacttatcctaaaacaaatagtttataaatgtgaacttaaactctaattaattccaactgtacttttaaggcagtggctgtttttagactttcttatcacttatagttagtaatgtacacctactctatcagagaaaaacaggaaaggctcgaaatacaagccattctaaggaaattagggagtcagttgaaattctattctgatcttattctgtggtgtcttttgcagcccagacaaatgtggttacacactttttaagaaatacaattctacattgtcaagcttatgaaggttccaatcagatctttattgttattcaatttggatctttcagggattttttttttaaattattatgggacaaaggacatttgttggaggggtgggagggaggaacaatttttaaatataaaacattcccaagtttggatcagggagttggaagttttcagaataaccagaactaagggtatgaaggacctgtattggggtcgatgtgatgcctctgcgaagaaccttgtgtgacaaatgagaaacattttgaagtttgtggtacgacctttagattccagagacatcagcatggctcaaagtgcagctccgtttggcagtgcaatggtataaatttcaagctggatatgtctaatgggtatttaaacaataaatgtgcagttttaactaacaggatatttaatgacaaccttctggttggtagggacatctgtttctaaatgtttattatgtacaatacagaaaaaaattttataaaattaagcaatgtgaaactgaattggagagtgataatacaagtcctttagtcttacccagtgaatcattctgttccatgtctttggacaaccatgaccttggacaatcatgaaatatgcatctcactggatgcaaagaaaatcagatggagcatgaatggtactgtaccggttcatctggactgccccagaaaaataacttcaagcaaacatcctatcaacaacaaggttgttctgcataccaagctgagcacagaagatgggaacactggtggaggatggaaaggctcgctcaatcaagaaaattctgagactattaataaataagactgtagtgtagatactgagtaaatccatgcacctaaaccttttggaaaatctgccgtgggccctccagatagctcatttcattaagtttttccctccaaggtagaatttgcaagagtgacagtggattgcatttcttttggggaagctttcttttggtggttttgtttattataccttcttaagttttcaaccaaggtttgcttttgttttgagttactggggttatttttgttttaaataaaaataagtgtacaataagtgtttttgtattgaaagcttttgttatcaagattttcatacttttaccttccatggctctttttaagattgatacttttaagaggtggctgatattctgcaacactgtacacataaaaaatacggtaaggatactttacatggttaaggtaaagtaagtctccagttggccaccattagctataatggcactttgtttgtgttgttggaaaaagtcacattgccattaaactttccttgtctgtctagttaatattgtgaagaaaaataaagtacagtgtgagatactg

SEQ ID NO: 409 - DNA, 480 bp, Artificial Sequence
  Description of Artificial sequences:primer
  misc_feature (1)..(480): 3' terminal sequence from clone image:2349125. pre-b lymphocyte gene 3(VPREB3) gene.
gttgttgacatgttttttattattaacccattttacagaggggaagcaaggctcagagaaagtttaaaagggacccaaggtcaggggcagaaatgggaggcagaggggaggcacccatctcacaccccacccctagggactaaagccgtagccaacagagcagtagtaatccgcgtcgtcttcaggctgcacgggactaatggtgaggacacaggcattgtgggcctcatccttggctgccgagaatcgatcggggatgtcagcaggccggtggtgatcctcctccgagcggtagtagaggagatatcgaggggcactgcctgcccgctgctggtaccaggacacaccgtagtccctgatggtgacgtgctgggggctgagcgtgcaggagagttgagccacttggcctgtgaagaccagcagtgcatccagctgggccaggactgtctgggaaactgacaggaaggtccccatcagaag

SEQ ID NO: 410 - DNA, 548 bp, Artificial Sequence
  Description of Artificial sequences:primer
  misc_feature (1)..(548): pre-b lymphocyte gene 3(VPREB3) gene.
gccttgcagaacttctacttgcctgcctccctgcctctggccatggcctgccggtgcctcagcttccttctgatggggaccttcctgtcagtttcccagacagtcctggcccagctggatgcactgctggtcttcccaggccaagtggctcaactctcctgcacgctcagcccccagcacgtcaccatcagggactacggtgtgtcctggtaccagcagcgggcaggcagtgcccctcgatatctcctctactaccgctcggaggaggatcaccaccggcctgctgacatccccgatcgattctcggcagccaaggatgaggcccacaatgcctgtgtcctcaccattagtcccgtgcagcctgaagacgacgcggattactactgctctgttggctacggctttagtccctaggggtggggtgtgagatgggtgcctcccctctgcctcccatttctgcccctgaccttgggtcccttttaaactttctctgagccttgcttcccctctgtaaaatgggttaataatattcaacatgtcaacaaaaa

SEQ ID NO: 411 - DNA, 274 bp, Artificial Sequence
  Description of Artificial sequences:primer
  misc_feature (1)..(274): 3' terminal sequence from clone image:235934. properdin p factor, complement(PFC) gene.
  misc_feature (122)..(122): n is a, c, g, or t
  misc_feature (154)..(154): n is a, c, g, or t
  misc_feature (180)..(180): n is a, c, g, or t
  misc_feature (197)..(197): n is a, c, g, or t
  misc_feature (214)..(214): n is a, c, g, or t
  misc_feature (219)..(219): n is a, c, g, or t
  misc_feature (231)..(231): n is a, c, g, or t
  misc_feature (246)..(246): n is a, c, g, or t
tgaggtttggaaggtcagggggctcagagtggaggagagaagtgttagagttcctcttcctcagggtctttgcaagcaggcacgtgtagacatggtcgtttctcctccaccaccagcttctncccttgtagctcctcacaccgtggcagcggtntcccccagaaggtcacattcttctcnccctgaccttcgaccanggaaacggtgggagggnacttngggagcaagggntgtgcagaggcgctngcgggcacgggtaggattaggtccacag

SEQ ID NO: 412 - DNA, 353 bp, Artificial Sequence
  Description of Artificial sequences:primer
  misc_feature (1)..(353): 5' terminal sequence from clone image:235934. properdin p factor, complement(PFC) gene.
  misc_feature (2)..(2): n is a, c, g, or t
  misc_feature (47)..(47): n is a, c, g, or t
gngaagaggaactctaacacttctctcctccactctgagcccccttnctgattccctgctttggtccaatcccctgttgccctgtctctgcagtggatggggagtgggactcgtggggggagtggagcccctgtatccgacggaacatgaagtccatcagctgtcaagaaatcccgggccagcagtcacgcgggaggacctgcaggggccgcaagtttgacggacatcgatgtgccgggcaacagcaggatatccggcactgctacagcatccagcactgccccttgaaaggatcatggtcagagtggagtacctggggggctgtgcatgccccccttgttggacctgaattc

SEQ ID NO: 413 - DNA, 1701 bp, Artificial Sequence
  Description of Artificial sequences:primer
  misc_feature (1)..(1701): properdin p factor, complement(PFC) gene.
gagcaccgcacactcacttcaccctggttcaacacccccacgaggttgaccccgtcattatgttagagattatgcattttccacatagggaaactgaggctcaggggtgttaagtgactcacccaaggtcacacggctaggaagttgctgcacgctcctatgctccatttcctctgggagcctatcaacccagataaagcgggacctcctctctggtagaggtgcagggggcagtactcaacatgatcacagagggagcgcaggcccctcgattgttgctgccgccgctgctcctgctgctcaccctgccagccacaggctcagaccccgtgctctgcttcacccagtatgaagaatcctccggcaagtgcaagggcctcctggggggtggtgtcagcgtggaagactgctgtctcaacactgcctttgcctaccagaaacgtagtggtgggctctgtcagccttgcaggtccccacgatggtccctgtggtccacatgggccccctgttcggtgacgtgctctgagggctcccagctgcggtaccggcgctgtgtgggctggaatgggcagtgctctggaaaggtggcacctgggaccctggagtggcagctccaggcctgtgaggaccagcagtgctgtcctgagatgggcggctggtctggctgggggccctgggagccttgctctgtcacctgctccaaagggacccggacccgcaggcgagcctgtaatcaccctgctcccaagtgtgggggccactgcccaggacaggcacaggaatcagaggcctgtgacacccagcaggtctgccccacacacggggcctgggccacctggggcccctggaccccctgctcagcctcctgccacggtggaccccacgaacctaaggagacacgaagccgcaagtgttctgcacctgagccctcccagaaacctcctgggaagccctgcccggggctagcctacgagcagcggaggtgcaccggcctgccaccctgcccagtggctgggggctgggggccttggggccctgtgagcccctgccctgtgacctgtggcctgggccagaccatggaacaacggacgtgcaatcaccctgtgccccagcatgggggccccttctgtgctggcgatgccacccggacccacatctgcaacacagctgtgccctgccctgtggatggggagtgggactcgtggggggagtggagcccctgtatccgacggaacatgaagtccatcagctgtcaagaaatcccgggccagcagtcacgcgggaggacctgcaggggccgcaagtttgacggacatcgatgtgccgggcaacagcaggatatccggcactgctacagcatccagcactgccccttgaaaggatcatggtcagagtggagtacctgggggctgtgcatgcccccctgtggacctaatcctacccgtgcccgccagcgcctctgcacacccttgctccccaagtacccgcccaccgtttccatggtcgaaggtcagggcgagaagaacgtgaccttctgggggagaccgctgccacggtgtgaggagctacaagggcagaagctggtggtggaggagaaacgaccatgtctacacgtgcctgcttgcaaagaccctgaggaagaggaactctaacacttctctcctccactctgagccccctgaccttccaaacctcaataaa

SEQ ID NO: 414 - DNA, 449 bp, Artificial Sequence
  Description of Artificial sequences:primer
  misc_feature (1)..(449): 3' terminal sequence from clone image:235938. bcl2-antagonist/killer 1(BAK1) gene.
  misc_feature (2)..(3): n is a, c, g, or t
  misc_feature (14)..(14): n is a, c, g, or t
  misc_feature (43)..(43): n is a, c, g, or t
  misc_feature (419)..(419): n is a, c, g, or t
  misc_feature (424)..(424): n is a, c, g, or t
  misc_feature (434)..(434): n is a, c, g, or t
  misc_feature (447)..(447): n is a, c, g, or t
annagtggatattncacagtttatttccaaacactcagagganagggggtggcctatgggtccatctgcctcccctccctgcatttggctgaatcaagaacttctcccccctgacccccaagaccctaggctgtgccaatagagaaggcactgtcaccccccaccctgaggagacctagacaggtgaggagcatggagggtgggggaacagagttcaagtattcacagttcccccatctacaccccgggattacactgtgccagagccatgagggaggatcccacctctgggattcctagtgggtgttgatagtccttctcccacttaggaaccctccagatgaactccctactccttttccctggaaataacaaaccaaggtcctaaggccctgtagtttggggcaagggagggagtntaggnagggccattnacccaagggcccntt

SEQ ID NO: 415 - DNA, 409 bp, Artificial Sequence
  Description of Artificial sequences:primer
  misc_feature (1)..(409): 5' terminal sequence from clone image:235938. bcl2-antagonist/killer 1(BAK1) gene.
  misc_feature (227)..(227): n is a, c, g, or t
  misc_feature (232)..(232): n is a, c, g, or t
  misc_feature (283)..(283): n is a, c, g, or t
  misc_feature (349)..(349): n is a, c, g, or t
  misc_feature (360)..(360): n is a, c, g, or t
  misc_feature (386)..(386): n is a, c, g, or t
  misc_feature (391)..(391): n is a, c, g, or t
ctatgttccccaggattcagctattctggaagatcagcaccctaagagatgggactaggacctgagcctggtcctggccgtccctaagcatgtgtcccaggagcaggacctactaggagaggggggccaaggtcctgctcaactctacccctgctcccattcctccctccggccatactgcctttgcagttggactctcagggattctgggcttggggtgtggggtngggtngagtcgcagacagagctgtctgaactcacgtgtcagaagcctccaagcctncctcccaaggtcctctcagttctctcccttcctctctccttatagacacttgctcccaacccattncactacaggtnaaggcttttcacccccatcctggggnccttnggttgagttgcctggtta

SEQ ID NO: 416 - DNA, 2094 bp, Artificial Sequence
  Description of Artificial sequences:primer
  misc_feature (1)..(2094): bcl2-antagonist/killer 1(BAK1) gene.
gaggatctacaggggacaagtaaaggctacatccagatgccgggaatgcactgacgcccattcctggaaactgggctcccactcagcccctgggagcagcagccgccagcccctcggacctccatctccaccctgctgagccacccgggttgggccaggatcccggcaggctgatcccgtcctccactgagacctgaaaaatggcttcggggcaaggcccaggtcctcccaggcaggagtgcggagagcctgccctgccctctgcttctgaggagcaggtagcccaggacacagaggaggttttccgcagctacgttttttaccgccatcagcaggaacaggaggctgaaggggtggctgcccctgccgacccagagatggtcaccttacctctgcaacctagcagcaccatggggcaggtgggacggcagctcgccatcatcggggacgacatcaaccgacgctatgactcagagttccagaccatgttgcagcacctgcagcccacggcagagaatgcctatgagtacttcaccaagattgccaccagcctgtttgagagtggcatcaattggggccgtgtggtggctcttctgggcttcggctaccgtctggccctacacgtctaccagcatggcctgactggcttcctaggccaggtgacccgcttcgtggtcgacttcatgctgcatcactgcattgcccggtggattgcacagaggggtggctgggtggcagccctgaacttgggcaatggtcccatcctgaacgtgctggtggttctgggtgtggttctgttgggccagtttgtggtacgaagattcttcaaatcatgactcccaagggtgccctttgggtcccggttcagacccctgcctggacttaagcgaagtctttgccttctctgttcccttgcagggtcccccctcaagagtacagaagctttagcaagtgtgcactccagcttcggaggccctgcgtgggggccagtcaggctgcagaggcacctcaacattgcatggtgctagtgccctctctctgggcccagggctgtggccgtctcctccctcagctctctgggacctccttagccctgtctgctaggcgctggggagactgataacttggggaggcaagagactgggagccacttctccccagaaagtgtttaacggttttagctttttataatacccttgtgagagcccattcccaccattctacctgaggccaggacgtctggggtgtggggattggtgggtctatgttccccaggattcagctattctggaagatcagcaccctaagagatgggactaggacctgagcctggtcctggccgtccctaagcatgtgtcccaggagcaggacctactaggagaggggggccaaggtcctgctcaactctacccctgctcccattcctccctccggccatactgcctttgcagttggactctcagggattctgggcttggggtgtggggtggggtggagtcgcagaccagagctgtctgaactcacgtgtcagaagcctccaagcctgcctcccaaggtcctctcagttctctcccttcctctctccttatagacacttgctcccaacccattcactacaggtgaaggctctcacccatccctgggggccttgggtgagtggcctgctaaggctcctccttgcccagactacagggcttaggacttggtttgttatatcagggaaaaggagtagggagttcatctggagggttctaagtgggagaaggactatcaacaccactaggaatcccagaggtggatcctccctcatggctctggcacagtgtaatccaggggtgtagatgggggaactgtgaatacttgaactctgttcccccaccctccatgctcctcacctgtctaggtctcctcagggtggggggtgacagtgccttctctattggcacagcctagggtcttgggggtcaggggggagaagttcttgattcagccaaatgcagggaggggaggcagatggagcccataggccaccccctatcctctgagtgtttggaaataaactgtgcaatcccctcaaaaaaaaaacggagatcc

SEQ ID NO: 417 - DNA, 273 bp, Artificial Sequence
  Description of Artificial sequences:primer
  misc_feature (1)..(273): 3' terminal sequence from clone image:236008. hypothetical protein mgc13071(MGC13071) gene.
  misc_feature (199)..(199): n is a, c, g, or t
  misc_feature (243)..(243): n is a, c, g, or t
atgtttattgaacgtaacagtatatttcatgtagtttcccataattttttcatgtactaactcatgtaattctttgttttttagagatctgaagtgattttacctttacttccttcactttaagccaatcatgaaatttcagtgatttctggggtgagggcgaaaggtggtgttacgaatcatcggggctgtggccagnttgcctcacggaggtgcaggtaggctggggcctcactagggcanctggaggagcacggactgccctgccggcag

SEQ ID NO: 418 - DNA, 330 bp, Artificial Sequence
  Description of Artificial sequences:primer
  misc_feature (1)..(330): 5' terminal sequence from clone image:236008. hypothetical protein mgc13071(MGC13071) gene.
  misc_feature (99)..(99): n is a, c, g, or t
  misc_feature (318)..(318): n is a, c, g, or t
  misc_feature (326)..(326): n is a, c, g, or t
ggagtacagaacattgtggtaggggaagggactcactttctcatcccatgtgtacaaaaaccaattatctttgactgctgttctcaaccacgtagtcgnccagtcatcactggtagcaaagatttacagaatgtcaacatcacactgtgcatcctcttccggcccatcactagccagcttcctcgcatcttcaccagcattggagaggactacgatgagtgtgtgctgccgttcattaccacggagatcctcaagtcactggtggctcgctttgatgctggagaactaatcacccagagggagcttggtttccagccnggtgaagnacca

SEQ ID NO: 419 - DNA, 3198 bp, Artificial Sequence
  Description of Artificial sequences:primer
  misc_feature (1)..(3198): hypothetical protein mgc13071(MGC13071) gene.
tgagaaaccctatgaatgtaaagagtgtggggaagcttttaggactagccgtcaacttactgtacatcatagatttcattatggtgagaaaccctacgaatgtaaggaatgtggcaaggccccagtgtgtatggacgacttagtcgacatcagagtattcacactggtgagaagccctttgaatgtaacaaatgtgggaagtcctttaggctcaaagcaggccttaaagtacatcagagtattcatactggagagaagccacatgaatgtaaggaatgtggaaaggcctttcgtcagttttcccaccttgtgggtcataaaagaattcatactggagaaaaaccctatgaatgcaaggaatgcgggaagggctttacatgtaggtatcaacttaccatgcatcagagaatttattcaggggagaaacactatgaatgtaaagaaaatggggaggcttttagtagtggccatcaacttactgcacctcatacatttgaaagtgttgagaaaccttataagtgtgaggaatgtgggaaagcctttagtgtgcatggacgacttactcgacatcagggtattcatagtggtaagaaaccctatgaatgtaacaaatgtgggaagtcctttaggctcaattcatcccttaaaatacatcaaaatattcataccggtgagaaaccctacaaatgtaaggaatgtgggaaggccttcagtcagcgtgcacaccttgcccatcataacagaattcatactggttacaaaccctttgaatgtaaagaatgtgggaagtcctttcgttgtgcctcatatcttgttatacatgagagaattcatacgggagagaaaccctatgtatgtcaagagtgtgggaagggttttagttatagccataaactcactatacatcgcagagttcatactggtgagaaaccttatgaatgtaaggaatgtgggaaggcctttagtgtatctggacaacttactcagcatctgagtattcacagtggtaagagaccctttgaatgcaacaaatgcgggaagtcttttaggttcatttctgtacttaaagcccatcagaatattcatagcgctgagaaaccctacgaatgtaaggaatgtggcaaggcctttcgtcatgccacaagcctcatatatcatgaccgaactcatgctggtgaaaagtcctatgaatgtaaagaatgtggggaaacttttagtcatgcttcacatcttattattcatgagagaattcataccagtgataaaccctatgaatgtaaaagatgtgggaaggcatttcactgtgcctcatatcttgttagacatgaaagcgttcatgctgatggaaatccctatatgtgtgaagagtgtgggaaaggtcttaatagtagccatgaacttagtatacatcatagagttcatactggtgagaaaccctttaaatgtaacaaatgcagaaggtcctttaggcttagatccatccttgaagtacatcagagaattcatatttgatagagaaattgtggcatatacaggtagtaaagaaagcacattgtgtcaatggatttatcccactgaacaatttgaatgaagacaatgtggaatggctttgagatacagttcagtttttattaggcatcaatttgtattggtgtgaacttttcaaaatgtaaatcatatatgcagtttctttggtatgacctgtgttaactcagattcagagaatttataatgtatttttttaataacataagaaaacttttctgatattcctctagttttggattgccaaaatattcatagtagaggaaaactgagaaaacgtaggaaaccattctttatacttgcatgtaaacatcttccagcaacaatcatttattgttaaacctggaaaaagccattacacaggaaacctctgttgatataagcgatgatgggaaaggctatttagccactctgcatatttaatgctcatgatcaacatctgcttcctatagctgggatgatatgggggaagatatttatcccttctggggatcatatataaatgatgatagtagtacctacagtatagtgctgttagaattacatgagttagatgtggaggtcagagtggaagcaggtgtgagagggtcccgcagaagaaaacatggctgccaaagtgtttgagtccatcggcaagtttggcctggccttagctgttgcaggaggcatggtgaactctgccttatgtaatgtggatgctgggcacagagctgccatctttgaccaattccgtggagtacagaacattgtggtaggggaagggactcactttctcatcccatgtgtacaaaaaccaattatctttgactgctgttctcaaccacgtagtgcgccagtcatcactggtagcaaagatttacagaatgtcaacatcacactgtgcatcctcttccggcccatcactagccagcttcctcgcatcttcaccagcattggagaggactacgatgagtgtgtgctgccgttcattaccacggagatcctcaagtcactggtggctcgctttgatgctggagaactaatcacccagagggagctggtctccagccaggtgagcaacaaccttatggagtgagcagccacctttgggctcattctggacgacgtgtctttgacacatctgaccttcttgaaggagttaacagacaggtggccccccaggaagcagagagcgccagatttgtggtggaaaaggcggccatcatctctgctgagggtgactccaaggcagctgagctgatcgccaactcactggccactgcaggggacggccagagcgagctgtgcaagctggaagctgcagaagacattgcataccagctctcatgctctcggaacatcacctgcctgccggcagggcagtccgtgctcctccagctgccctagtgaggccccagcctacctgcacctccgtgaggcaactgggccacagccccgatgattcgtaacaccacctttcgccctcaccccagaaatcactgaaatttcatgattggcttaaagtgaaggaagtaaaggtaaaatcacttcagatctctaaaaaacaaagaattacatgagttagtacatgaaaaaattatgggaaactacatgaaatatactgttacgttcaataaacattagcttctgtatataataaaaaaaaaaaaaaaa

SEQ ID NO: 420 - DNA, 403 bp, Artificial Sequence
  Description of Artificial sequences:primer
  misc_feature (1)..(403): 3' terminal sequence from clone image:236338. tumor protein p53 (li-fraumeni syndrome)(TP53) gene.
  misc_feature (94)..(94): n is a, c, g, or t
  misc_feature (139)..(139): n is a, c, g, or t
  misc_feature (190)..(190): n is a, c, g, or t
  misc_feature (216)..(216): n is a, c, g, or t
  misc_feature (274)..(274): n is a, c, g, or t
  misc_feature (346)..(346): n is a, c, g, or t
  misc_feature (389)..(389): n is a, c, g, or t
ttattgtaaaataagagatcgatataaaaatgggatataaaaagggagaaggaggggaagggtggggtgaaaatgcagatgtgcttgcagaatntaaaagatgttgacccttccagctggacgtggtggctcacaattntaatcccagcactctgggaggctgagacaggtggatcgcctgagcccaggngtttgagaccagcctgggcaacactntgagaccccatctctacaaaacatgcaaaagttggctggccatggtggcatgaacctntggtcccagctactccggaggctgaggcaggactgctcgagccggggaggcaaaggctgcagtaagccaagntcacgccactccattccagcctgggcaacaaagcgagacccanttttcaaagaaaaa

SEQ ID NO: 421 - DNA, 368 bp, Artificial Sequence
  Description of Artificial sequences:primer
  misc_feature (1)..(368): 5' terminal sequence from clone image:236338. tumor protein p53 (li-fraumeni syndrome)(TP53) gene.
  misc_feature (233)..(233): n is a, c, g, or t
  misc_feature (296)..(296): n is a, c, g, or t
  misc_feature (317)..(317): n is a, c, g, or t
  misc_feature (322)..(322): n is a, c, g, or t
  misc_feature (336)..(336): n is a, c, g, or t
acagttcctgcatgggcggcatgaaccggagcccatcctcaccatcatcacactggaagactccagtggtaatctactgggacggaacagctttgaggtgcgtgtttgtgcctgtcctgggagagaccggcgcacagaggaagagaatctccgcaagaaaggggagcctcaccacgagctgcccccagggagcactaagcgagcactgcccaacaacaccagctcctctcccnagccaaagaagaaaccactggatggagaatatttcacccttcagatccgtgggcgtgaggctntcgagatgttccgagagctgnaatgnaggccttggaactnaaggatgtccaggctgggaaggagccaggggg

SEQ ID NO: 422 - DNA, 396 bp, Artificial Sequence
  Description of Artificial sequences:primer
  misc_feature (1)..(396): 3' terminal sequence from clone image:23643. calpain 2, (m/ii) large subunit(CAPN2) gene.
  misc_feature (12)..(12): n is a, c, g, or t
  misc_feature (120)..(120): n is a, c, g, or t
  misc_feature (275)..(275): n is a, c, g, or t
  misc_feature (320)..(320): n is a, c, g, or t
  misc_feature (374)..(374): n is a, c, g, or t
tttttttttttngcatggggtaaccctttatttttatttaacagtacatttggaagaagataaggcaacaaggcaaaatttctataatgttgctagcattttcccaaggtaaagccaggnaacaaacttgtgtcctttctataagaacttctaagtgatgtcccctctaactccatggacagacactagtggtggtgaagttcataaagttttgaggtggcaaacagcttattttgtcctttatcataattggtttacaaattggatgcctgggntttggcatactggttcagttgatcaagcgcaggatccctttgggnctttgtaaggcccagatgtataaggcccgaataggggtcaagaactttgatttntaagggagaaccgattttacct

SEQ ID NO: 423 - DNA, 531 bp, Artificial Sequence
  Description of Artificial sequences:primer
  misc_feature (1)..(531): 5' terminal sequence from clone image:23643. calpain 2, (m/ii) large subunit(CAPN2) gene.
  misc_feature (459)..(459): n is a, c, g, or t
  misc_feature (515)..(515): n is a, c, g, or t
  misc_feature (530)..(530): n is a, c, g, or t
ttcagctttctttgggtcatagttcttacagctaacttatgtgttcagaaaatttaccgagaaatcgacgttgacaggtctggtaccatgaattctatgaaatgcggaaggattagaagaagcaggtttcaagatgccctgtcaactccaccaagtcatcgttgctcggtttgcagatgaccagctcatcatcgattttgataattttgttcggtgtttggttcggctggaaacgctattcaagatatttaagcagctggatcccgagaatactggaagaatagagctcgaccttatctcttggctctgtttctcagtactttgaagttataactaatctgcctgaagacttctcatgatgggaaaatcagccaagggacttaagcttccataggaaatacactttgtatctgggacctccaaaattatgggggaaccatttaactttaaacgggtggnccataggctggaaaattattggttactgtccattttggaggttggccggaagtttncacacctccaaggtna

SEQ ID NO: 424 - DNA, 3419 bp, Artificial Sequence
  Description of Artificial sequences:primer
  misc_feature (1)..(3419): calpain 2, (m/ii) large subunit(CAPN2) gene.
ttccctccggtgaatcatcgctcgcagcggcggcgcccgcagtggccgcagcagcgcgccgggccctggccgcgccccagccgagcgcagcgcggagtcgccccgacctttctctgcgcagtacggccgccgggaccgcagcatggcgggcatcgcggccaagctggcgaaggaccgggaggcggccgaggggctgggctcccacgagagggccatcaagtacctcaaccaggactacgaggcgctgcggaacgagtgcctggaggccgggacgctcttccaggacccgtccttcccggccatcccctcggccctgggcttcaaggagttggggccctactccagcaaaacccggggcatgagatggaagcgccccacggagatctgcgctgacccccagtttatcattggaggagccacccgcacagacatctgccaaggagccctaggtgactgctggctgctggcagccattgcctccctcaccttgaatgaagaaatcctggctcgagtcgtccccctaaaccagagcttccaggaaaactatgcagggatctttcacttccagttctggcaatacggcgagtgggtggaggtggtggtggatgacaggctgcccaccaaggacggggagctgctctttgtgcattcagccgaagggagcgagttctggagcgccctgctggagaaggcatacgccaagatcaacggatgctatgaagctctatcagggggtgccaccactgagggcttcgaagacttcaccggaggcattgctgagtggtatgagttgaagaagccccctcccaacctgttcaagatcatccagaaagctctgcaaaaaggctctctccttggctgctccatcgacatcaccagcgccgcggactcggaggccatcacgtttcagaagctggtgaaggggcacgcgtactcggtcaccggagccgaggaggttgaaagtaacggaagcctacagaaactgatccgcatccgaaatccctggggagaagtggagtggacagggcggtggaatgacaactgcccaagctggaacactatagacccagaggagagggaaaggctgaccagacggcatgaagatggagaattctggatgtctttcagtgacttcctgaggcactattcccgcctggagatctgtaacctgaccccagacactctcaccagcgatacctacaagaagtggaaactcaccaaaatggatgggaactggaggcggggctccaccgcgggaggttgcaggaactacccgaacacattctggatgaaccctcagtacctgatcaagctggaggaggaggatgaggacgaggaggatggggagagcggctgcaccttcctggtggggctcattcagaagcaccgacggcggcagaggaagatgggcgaggacatgcacaccatcggctttggcatctatgaggttccagaggagttaagtgggcagaccaacatccacctcagcaaaaacttcttcctgacgaatcgcgccagggagcgctcagacaccttcatcaacctccgggaggtgctcaaccgcttcaagctgccgccaggagagtacattctcgtgccttccaccttcgaacccaacaaggatggggatttctgcatccgggtcttttctgaaaagaaagctgactaccaagctgtcgatgatgaaatcgaggccaatcttgaagagttcgacatcagcgaggatgacattgatgatggagtcaggagactgtttgcccagttggcaggagaggatgcggagatctctgcctttgagctgcagaccatcctgagaagggttctagcaaagcgccaagatatcaagtcagatggcttcagcatcgagacatgcaaaattatggttgacatgctagattcggacgggagtggcaagctggggctgaaggagttctacattctctggacgaagattcaaaaataccaaaaaatttaccgagaaatcgacgttgacaggtctggtaccatgaattcctatgaaatgcggaaggcattagaagaagcaggtttcaagatgccctgtcaactccaccaagtcatcgttgctcggtttgcagatgaccagctcatcatcgattttgataattttgttcggtgtttggttcggctggaaacgctattcaagatatttaagcagctggatcccgagaatactggaacaatagagctcgaccttatctcttggctctgtttctcagtactttgaagttataactaatctgcctgaagacttctcatgatggaaaatcagccaaggactaagcttccatagaaatacactttgtatctggacctcaaaattatgggaacatttacttaaacggatgatcatagctgaaaataatgatactgtcaatttgagatagcagaagtttcacacatcaaagtaaaagatttgcatatcattatactaaatgcaaatgagtcgcttaacccttgacaaggtcaaagaaagctttaaatctgtaaatagtatacactttttacttttacacactttcctgttcatagcaatattaaatcaggaaaaaaaaatgcagggaggtatttaacagctgagcaaaaacattgagtcgctctcaaaggacacgaggcccttggcagggaatatttaaagcaacttcaagtttaaaatgcagctgttgattctaccaaacaacagtccaagattaccatttcccatgagccaactgggaaacatggtatatcatgaagtaatcttgtcaaggcatctggagagtccaggagaggagactcacctctgtcgcttgggttaaacaagagacaggttttgtagaatattgattggtaatagtaaatcgttctccttacaatcaagttcttgaccctattcggccttatacatctggtcttacaaagaccaaagggatcctgcgcttgatcaactgaaccagtatgccaaaaccaggcatccaatttgtaaaccaattatgataaaggacaaaataagctgtttgccacctcaaaactttatgaacttcaccaccactagtgtctgtccatggagttagaggggacatcacttagaagttcttatagaaaggacacaagtttgtttcctggctttaccttgggaaaatgctagcaacattatagaaattttgccttgttgccttatcttcttccaaatgtactgttaaataaaaataaagggttaccccatgcaatcacaccatgccatgttttccttcctggagggcagccccacaggacggtttatgagcacacaattatagcttgtttctactttaacagggtatgctgcctctgtaaattcatgtattcaaaggaaaagacaccttgcctataattaaaatgtggaactataaaattttttaaaatccaaaaaaaaaaaaaaa

SEQ ID NO: 425 - DNA, 257 bp, Artificial Sequence
  Description of Artificial sequences:primer
  misc_feature (1)..(257): 3' terminal sequence from clone image:23692. v-raf murine sarcoma 3611 viral oncogene homolog 1(ARAF1) gene.
  misc_feature (65)..(65): n is a, c, g, or t
  misc_feature (90)..(90): n is a, c, g, or t
  misc_feature (92)..(92): n is a, c, g, or t
  misc_feature (162)..(162): n is a, c, g, or t
  misc_feature (165)..(165): n is a, c, g, or t
  misc_feature (179)..(179): n is a, c, g, or t
  misc_feature (188)..(188): n is a, c, g, or t
  misc_feature (201)..(201): n is a, c, g, or t
  misc_feature (210)..(210): n is a, c, g, or t
  misc_feature (226)..(226): n is a, c, g, or t
  misc_feature (234)..(234): n is a, c, g, or t
  misc_feature (244)..(244): n is a, c, g, or t
ttttttttttttttttttttttttttcccagcaagaattctgtgcttcttggtaaagaaagaganggagtccttgaatggcgggggagananaaaagggaccccccaaaatccacatggggtgctgggaaccccaaaatccagtggaaggcacatcaggcanaanttccagagaggttntgagtggantccctgccacaantcccagccnttggagatggaggagntcccaaantttagaagtntccccaaagccaa

SEQ ID NO: 426 - DNA, 458 bp, Artificial Sequence
  Description of Artificial sequences:primer
  misc_feature (1)..(458): 5' terminal sequence from clone image:23692. v-raf murine sarcoma 3611 viral oncogene homolog 1(ARAF1) gene.
  misc_feature (7)..(7): n is a, c, g, or t
  misc_feature (49)..(49): n is a, c, g, or t
  misc_feature (96)..(96): n is a, c, g, or t
  misc_feature (130)..(130): n is a, c, g, or t
  misc_feature (380)..(380): n is a, c, g, or t
tgggctnatgcccggccggatttccatcatacacagtggtgtagggctncagctctaccatcacctgcatgtggccgacacacgcttcgacatggncagctcatcgacgtggcccggcagactgccaggnatggactacctccatgcaagaacatcatccaccgagatctcaagtctaacaacatcttcctacatgaggggctcacggtgaagatcggtgactttggcttggcacagtgaagactcgatggagcggggcccagcctttggagcagccctcaggatctgtgctgtggatggcagctgaggtgatccgtatgcaggacccgaacccctacagcttctagtcagacgtctatgcctacggggtttgttgcttntacgagtttattgacttggctcactgcctttacagcttacatttggctgccgttgaccagatttatctttatgggttg

SEQ ID NO: 427 - DNA, 2466 bp, Artificial Sequence
  Description of Artificial sequences:primer
  misc_feature (1)..(2466): v-raf murine sarcoma 3611 viral oncogene homolog 1(ARAF1) gene.
acgtgaccctgacccaataagggtggaaggctgagtccgcagagccaataacgagagtccgagaggcgacggaggcggactctgtgaggaaacaagaagagaggcccaagatggagacggcggcggctgtagcggcgtgacaggagccccatggcacctgcccagccccacctcagcccatcttgacaaaatctaaggctccatggagccaccacggggcccccctgccaatggggccgagccatcccgggcagtgggcaccgtcaaagtatacctgcccaacaagcaacgcacggtggtgactgtccgggatggcatgagtgtctacgactctctagacaaggccctgaaggtgcggggtctaaatcaggactgctgtgtggtctaccgactcatcaagggacgaaagacggtcactgcctgggacacagccattgctcccctggatggcgaggagctcattgtcgaggtccttgaagatgtcccgctgaccatgcacaattttgtacggaagaccttcttcagcctggcgttctgtgacttctgccttaagtttctgttccatggcttccgttgccaaacctgtggctacaagttccaccagcattgttcctccaaggtccccacagtctgtgttgacatgagtaccaaccgccaacagttctaccacagtgtccaggatttgtccggaggctccagacagcatgaggctccctcgaaccgccccctgaatgagttgctaaccccccagggtcccagcccccgcacccagcactgtgacccggagcacttccccttccctgccccagccaatgcccccctacagcgcatccgctccacgtccactcccaacgtccatatggtcagcaccacggcccccatggactccaacctcatccagctcactggccagagtttcagcactgatgctgccggtagtagaggaggtagtgatggaaccccccgggggagccccagcccagccagcgtgtcctcggggaggaagtccccacattccaagtcaccagcagagcagcgcgagcggaagtccttggccgatgacaagaagaaagtgaagaacctggggtaccgggactcaggctattactgggaggtaccacccagtgaggtgcagctgctgaagaggatcgggacgggctcgtttggcaccgtgtttcgagggcggtggcatggcgatgtggccgtgaaggtgctcaaggtgtcccagcccacagctgagcaggcccaggctttcaagaatgagatgcaggtgctcaggaagacgcgacatgtcaacatcttgctgtttatgggcttcatgacccggccgggatttgccatcatcacacagtggtgtgagggctccagcctctaccatcacctgcatgtggccgacacacgcttcgacatggtccagctcatcgacgtggcccggcagactgcccagggcatggactacctccatgccaagaacatcatccaccgagatctcaagtctaacaacatcttcctacatgaggggctcacggtgaagatcggtgactttggcttggccacagtgaagactcgatggagcggggcccagcccttggagcagccctcaggatctgtgctgtggatggcagctgaggtgatccgtatgcaggacccgaacccctacagcttccagtcagacgtctatgcctacggggttgtgctctacgagcttatgactggctcactgccttacagccacattggctgccgtgaccagattatctttatggtgggccgtggctatctgtccccggacctcagcaaaatctccagcaactgccccaaggccatgcggcgcctgctgtctgactgcctcaagttccagcgggaggagcggcccctcttcccccagatcctggccacaattgagctgctgcaacggtcactccccaagattgagcggagtgcctcggaaccctccttgcaccgcacccaggccgatgagttgcctgcctgcctactcagcgcagcccgccttgtgccttaggccccgcccaagccaccagggagccaatctcagccctccacgccaaggagccttgcccaccagccaatcaatgttcgtctctgccctgatgctgcctcaggatcccccattccccaccctgggagatgagggggtccccatgtgcttttccagttcttctggaattgggggacccccgccaaagactgagccccctgtctcctccatcatttggtttcctctttggctttggggatacttctaaattttgggagctcctccatctccaatggctgggatttgtggcagggattccactcagaacctctctggaatttgtgcctgatgtgccttccactggattttggggttcccagcaccccatgtggattttgggggtcccttttgtgtctcccccgccattcaaggactcctctctttcttcaccaagaagcacagaattc

SEQ ID NO: 428 - DNA, 355 bp, Artificial Sequence
  Description of Artificial sequences:primer
  misc_feature (1)..(355): 3' terminal sequence from clone image:23776. quinoid dihydropteridine reductase(QDPR) gene.
  misc_feature (267)..(267): n is a, c, g, or t
  misc_feature (287)..(287): n is a, c, g, or t
  misc_feature (331)..(331): n is a, c, g, or t
  misc_feature (340)..(340): n is a, c, g, or t
tttttttttttttttttttgtgttgaaatatttatttcagggatttaaatccacccccttctgatgaacatcaggattaaaagacctccagcaatccatgattctagtatactcatctctgactgctgtatataagatgtgatttgattaaagaagacagacaacaagtgcatttattatggaacaacattctgaatactcacgagtagttatcttgcacacttaaccctaggccagaggacacggggcaaccacacaggaaaaggntaccaggggcagagtccatngtagttttgcttatacccacaaaagggagttaagggcagtttanttcaagggntgccgaaaactacgg

SEQ ID NO: 429 - DNA, 350 bp, Artificial Sequence
  Description of Artificial sequences:primer
  misc_feature (1)..(350): 5' terminal sequence from clone image:23776. quinoid dihydropteridine reductase(QDPR) gene.
  misc_feature (6)..(6): n is a, c, g, or t
  misc_feature (30)..(30): n is a, c, g, or t
  misc_feature (275)..(275): n is a, c, g, or t
  misc_feature (323)..(323): n is a, c, g, or t
  misc_feature (339)..(339): n is a, c, g, or t
acgcgngtgctggtgtcggcggcaggggcntctgggttctcgatgcgtgcaggcttttcgggccgcaactggtgggttccagcgttgatgtggtggagaatgaagaggccagcgctaatcattgttaaaatgacagactcgttcactgagcaggctgaccaggtgactgctgaggttggaaagctcttgggtgaagagaaggtggatgcaattctttgcgttgctggaggatgggccggggcaatgccaaatccaagtctctcttttaagaactnttgacctgatgtgggaagcagagcattattggacatccgaccatcttnccagccatcttggctnacccaagcatc

SEQ ID NO: 430 - DNA, 1550 bp, Artificial Sequence
  Description of Artificial sequences:primer
  misc_feature (1)..(1550): quinoid dihydropteridine reductase(QDPR) gene.
gtggcctaccatggtttcaacgggtaacggggaataagggttcgattcggagctgcgggagccgggctggcaggagcaggatggcggcggcggcggctgcaggcgaggcgcgccgggtgctggtgtacggcggcaggggcgctctgggttctcgatgcgtgcaggcttttcgggcccgcaactggtgggttgccagcgttgatgtggtggagaatgaagaggccagcgctacgatcattgttaaaatgacagactcgttcactgagcaggctgaccaggtgactgctgaggttggaaagctcttgggtgaagagaaggtggatgcaattctttgcgttgctggaggatgggccgggggcaatgccaaatccaagtctctctttaagaactgtgacctgatgtggaagcagagcatatggacatcgaccatctccagccatctggctaccaagcatctcaaggaaggaggcctcctgaccttggctggcgcaaaggctgccctggatgggactcctggtatgatcgggtacggcatggccaagggtgctgttcaccagctctgccagagcctggctgggaagaacagcggcatgccgcccggggcagccgccatcgctgtgctcccggttaccctggataccccgatgaacaggaaatcaatgcctgaggctgacttcagctcctggacacccttagaattcctagttgaaactttccatgactggatcacagggaaaaaccgaccgagctcaggaagcctaatccaggtggtaaccacagaaggaaggacggaactcaccccagcatatttttaggcctcatctcagtgcctatgaggggcctgccagaaaagtcactaacctgtctcagtgtggccttgtccagccttgtgttttctgtaacccctgtttgtggtacgagataatgagtcctatttttctctcacataatatgcatttgctctcctagggacaagtgtaatacatttatgtgaagtaagacaatgcgagactggtggccgtcaaatagcatccgtcaatctgtgttaactgcataggaggctctcgatagcacctgctatagcggtgtcatgttggatcgctttgtgactgttcatctgtccttgacagtggctgtcatcttgactactttgttgatttgttggtattggggacattttaaaggctgagttatttttgaatgtcatgtttatgtcatagacgtagaaaacgcatccttgaattaaactgccttaactccttttgtggtataagcaaactacatggactctgtccctggtatccttttcctgtgtggttgcccctgtgcctgtggtctggcctaggttaagtgtgcaagataactactcgtgagttattcagaatgttgttcctaataaatgcacttgttgtctgtcttctttaatcaaatcacatcttatatacagcagtcagagatgagtatactagaatcatggattgctggaggtcttttaatctgatgttctcagaagggggtggatttaaatcctgaaataaatatttcaacac

SEQ ID NO: 431 - DNA, 340 bp, Artificial Sequence
  Description of Artificial sequences:primer
  misc_feature (1)..(340): 3' terminal sequence from clone image:238612. solute carrier family 12 (sodium/potassium/chloride transporters), member 2(SLC12A2) gene.
  misc_feature (157)..(157): n is a, c, g, or t
  misc_feature (280)..(280): n is a, c, g, or t
  misc_feature (322)..(322): n is a, c, g, or t
aatttcagaaggcacctcaaggctaaaggctttttgtacttctttcatcaatcaaaaagttaacacgcttttattgctattcaagtagcaaaggaaaactactctcacaaacttcagttcaacaaagaagaatcaccattaagattgagatatgganttgactaaaaccgaagtctccatacacgttatcaatggagcaactttcctgtgtgctttcaaattaatgaaatcgtgaaagaaatgtcaccattcgccattgtgatgttaatgtgtcattgangatttcagttactacactagggcactgaagtaccattctggnaggggctgtccactgtat

SEQ ID NO: 432 - DNA, 381 bp, Artificial Sequence
  Description of Artificial sequences:primer
  misc_feature (1)..(381): 5' terminal sequence from clone image:238612. solute carrier family 12 (sodium/potassium/chloride transporters), member 2(SLC12A2) gene.
  misc_feature (2)..(2): n is a, c, g, or t
  misc_feature (6)..(7): n is a, c, g, or t
  misc_feature (10)..(10): n is a, c, g, or t
  misc_feature (13)..(13): n is a, c, g, or t
  misc_feature (16)..(16): n is a, c, g, or t
  misc_feature (23)..(23): n is a, c, g, or t
  misc_feature (33)..(33): n is a, c, g, or t
  misc_feature (45)..(45): n is a, c, g, or t
  misc_feature (50)..(50): n is a, c, g, or t
  misc_feature (58)..(58): n is a, c, g, or t
  misc_feature (60)..(61): n is a, c, g, or t
  misc_feature (63)..(63): n is a, c, g, or t
  misc_feature (66)..(66): n is a, c, g, or t
  misc_feature (70)..(72): n is a, c, g, or t
  misc_feature (298)..(298): n is a, c, g, or t
  misc_feature (309)..(309): n is a, c, g, or t
  misc_feature (349)..(349): n is a, c, g, or t
  misc_feature (359)..(359): n is a, c, g, or t
anacannagngtnagntgttatntctaaggagngtgcatctcacnccctnacccaggnannanaanaacnnntccttaccttctattcataaatgttctatacagtggacagccctccagaatggtacttcagtgcctagtgtagtaactgaaatcttcaatgacacattaacatcacaatggcgaatggtgacttttctttcacgatttcattaatttgaaagcacacaggaaagttgctccattgataacgtgtatgggagacttcggttttagtcaattccatatctcatcttanggtgattcttntttgttgaactgaagtttgtgagagtagttttaccttggntacttggatnggccctaaaggcgtgttaacct

SEQ ID NO: 433 - DNA, 4098 bp, Artificial Sequence
  Description of Artificial sequences:primer
  misc_feature (1)..(4098): solute carrier family 12 (sodium/potassium/chloride transporters), member 2(SLC12A2) gene.
ggtggcctctgtggccgtccaggctagcggcggcccgcaggcggcggggagaaagactctctcacctggtcttgcggctgtggccaccgccggccaggggtgtggagggcgtgctgccggagacgtccgccgggctctgcagttccgccgggggtcgggcagctatggagccgcggcccacggcgccctcctccggcgccccgggactggccggggtcggggagacgccgtcagccgctgcgctggccgcagccagggtggaactgcccggcacggctgtgccctcggtgccggaggatgctgcgcccgcgagccgggacggcggcggggtccgcgatgagggccccgcggcggccggggacgggctgggcagacccttggggcccaccccgagccagagccgtttccaggtggacctggtttccgagaacgccgggcgggccgctgctgcggcggcggcggcggcggcggcagcggcggcggctggtgctggggcgggggccaagcagacccccgcggacggggaagccagcggcgagagcgagccagctaaaggcagcgaggaagccaagggccgcttccgcgtgaacttcgtggacccagctgcctcctcgtcggctgaagacagcctgtcagatgctgccggggtcggagtcgacgggcccaacgtgagcttccagaacggcggggacacggtgctgagcgagggcagcagcctgcactccggcggcggcggcggcagtgggcaccaccagcactactattatgatacccacaccaacacctactacctgcgcaccttcggccacaacaccatggacgctgtgcccaggatcgatcactaccggcacacagccgcgcagctgggcgagaagctgctccggcctagcctggcggagctccacgacgagctggaaaaggaaccttttgaggatggctttgcaaatggggaagaaagtactccaaccagagatgctgtggtcacgtatactgcagaaagtaaaggagtcgtgaagtttggctggatcaagggtgtattagtacgttgtatgttaaacatttggggtgtgatgcttttcattagattgtcatggattgtgggtcaagctggaataggtctatcagtccttgtaataatgatggccactgttgtgacaactatcacaggattgtctacttcagcaatagcaactaatggatttgtaagaggaggaggagcatattatttaatatctagaagtctagggccagaatttggtggtgcaattggtctaatcttcgcctttgccaacgctgttgcagttgctatgtatgtggttggatttgcagaaaccgtggtggagttgcttaaggaacattccatacttatgatagatgaaatcaatgatatccgaattattggagccattacagtcgtgattcttttaggtatctcagtagctggaatggagtgggaagcaaaagctcagattgttcttttggtgatcctacttcttgctattggtgatttcgtcataggaacatttatcccactggagagcaagaagccaaaagggttttttggttataaatctgaaatatttaatgagaactttgggcccgattttcgagaggaagagactttcttttctgtatttgccatcttttttcctgctgcaactggtattctggctggagcaaatatctcaggtgatcttgcagatcctcagtcagccatacccaaaggaacactcctagccattttaattactacattggtttacgtaggaattgcagtatctgtaggttcttgtgttgttcgagatgccactggaaacgttaatgacactatcgtaacagagctaacaaactgtacttctgcagcctgcaaattaaactttgatttttcatcttgtgaaagcagtccttgttcctatggcctaatgaacaacttccaggtaatgagtatggtgtcaggatttacaccactaatttctgcaggtatattttcagccactctttcttcagcattagcatccctagtgagtgctcccaaaatatttcaggctctatgtaaggacaacatctacccagctttccagatgtttgctaaaggttatgggaaaaataatgaacctcttcgtggctacatcttaacattcttaattgcacttggattcatcttaattgctgaactgaatgttattgcaccaattatctcaaacttcttccttgcatcatatgcattgatcaatttttcagtattccatgcatcacttgcaaaatctccaggatggcgtcctgcattcaaatactacaacatgtggatatcacttcttggagcaattctttgttgcatagtaatgttcgtcattaactggtgggctgcattgctaacatatgtgatagtccttgggctgtatatttatgttacctacaaaaaaccagatgtgaattggggatcctctacacaagccctgacttacctgaatgcactgcagcattcaattcgtctttctggagtggaagaccacgtgaaaaactttaggccacagtgtcttgttatgacaggtgctccaaactcacgtccagctttacttcatcttgttcatgatttcacaaaaaatgttggtttgatgatctgtggccatgtacatatgggtcctcgaagacaagccatgaaagagatgtccatcgatcaagccaaatatcagcgatggcttattaagaacaaaatgaaggcattttatgctccagtacatgcagatgacttgagagaaggtgcacagtatttgatgcaggctgctggtcttggtcgtatgaagccaaacacacttgtccttggatttaagaaagattggttgcaagcagatatgagggatgtggatatgtatataaacttatttcatgatgcttttgacatacaatatggagtagtggttattcgcctaaaagaaggtctggatatatctcatcttcaaggacaagaagaattattgtcatcacaagagaaatctcctggcaccaaggatgtggtagtaagtgtggaatatagtaaaaagtccgatttagatacttccaaaccactcagtgaaaaaccaattacacacaaagttgaggaagaggatggcaagactgcaactcaaccactgttgaaaaaagaatccaaaggccctattgtgcctttaaatgtagctgaccaaaagcttcttgaagctagtacacagtttcagaaaaaacaaggaaagaatactattgatgtctggtggctttttgatgatggaggtttgaccttattgataccttaccttctgacgaccaagaaaaaatggaaagactgtaagatcagagtattcattggtggaaagataaacagaatagaccatgaccggagagcgatggctactttgcttagcaagttccggatagacttttctgatatcatggttctaggagatatcaataccaaaccaaagaaagaaaatattatagcttttgaggaaatcattgagccatacagacttcatgaagatgataaagagcaagatattgcagataaaatgaaagaagatgaaccatggcgaataacagataatgagcttgaactttataagaccaagacataccggcagatcaggttaaatgagttattaaaggaacattcaagcacagctaatattattgtcatgagtctcccagttgcacgaaaaggtgctgtgtctagtgctctctacatggcatggttagaagctctatctaaggacctaccaccaatcctcctagttcgtgggaatcatcagagtgtccttaccttctattcataaatgttctatacagtggacagccctccagaatggtacttcagtgcctagtgtagtaacctgaaatcttcaatgacacattaacatcacaatggcgaatggtgacttttctttcacgatttcattaatttgaaagcacacaggaaagcttgctccattgataacgtgtatggagacttcggttttagtcaattccatatctcaatcttaatggtgattcttctctgttgaactgaagtttgtgagagtagttttcctttgctacttgaatagcaataaaagcgtgttaactttttgg

SEQ ID NO: 434 - DNA, 315 bp, Artificial Sequence
  Description of Artificial sequences:primer
  misc_feature (1)..(315): 3' terminal sequence from clone image:238840. hypothetical protein mgc5395(MGC5395) gene.
  misc_feature (4)..(4): n is a, c, g, or t
  misc_feature (268)..(268): n is a, c, g, or t
  misc_feature (284)..(284): n is a, c, g, or t
  misc_feature (297)..(297): n is a, c, g, or t
ttanataaacagctttatttgccttgtacagcatcaattttcttacattctcagttaattggccattaaagtgctggaaattttcttaatcatgataacatttgttaaaaagaaatcagaactaatatcaggaacatggcggcatgaaggaaacagttcccttacaaaacacagaaaatggaagcccctcatgttgaggggggtggggttggacaatttgcaaacagattctaatttcctctcaccgtcagcaccaaactggctgggnccaccacccctggggngaaagggaaccancactaagggacccctaaa

SEQ ID NO: 435 - DNA, 372 bp, Artificial Sequence
  Description of Artificial sequences:primer
  misc_feature (1)..(372): 5' terminal sequence from clone image:238840. hypothetical protein mgc5395(MGC5395) gene.
  misc_feature (283)..(283): n is a, c, g, or t
  misc_feature (293)..(293): n is a, c, g, or t
agcaaacgcccacagatggcccagaggtggtggtagtcagggtgtgtgggtgtttttagggttctttagtgttgtttctttcacccaggggtggtggtcccagccagtttggtgctgacggtgagaggaaattagaatctgtttgcaaattgtccaacccaccccctcaacatgaggggcttccattttctgtgttttgtaagggaactgtttccttcatgccgccatgttcctgatattagttctgatttctttttaacaatgttatcatgattaaggaaantttccagcantttaatgggccaattaactgaggatgtaagaaaattggatgctgtacaaggcaattaaagctgtttatttaacctttaa

SEQ ID NO: 436 - DNA, 1048 bp, Artificial Sequence
  Description of Artificial sequences:primer
  misc_feature (1)..(1048): hypothetical protein mgc5395(MGC5395) gene.
cggagctgctctgccgcggggactgcaccgcccgccctgccagacccgcccggaacggggctcgtcgccgccagtagccgcagcaccgcagccttgggcctcgcgccggctatggccgtgccctggggctgagccctcaggttgtgaccgagattcccgacgagagagactgaggggaagagaggaaggaggggcgggctcctggcaaggcattcgctcctgagcggaatcctgcaaagatggagaaggaggaggagacaacccgggagctgctgctgcccaactggcagggtagtggctcccacgggctgaccatcgcccagagggacgacggcgtctttgtgcaggaggtgacgcagaactcccctgcggcccgcactggggtggtcaaggagggggaccagattgtgggtgccaccatctactttgacaacctgcagtcgggtgaggtgacccagctgctgaacaccatggggcaccacacggtgggcctgaagctgcaccgcaagggggaccgctctcccgagcctggccagacctggacccgtgaagtcttcagctcctgcagctctgaagtggttctgaacacaccacagccatcagcactggaatgcaaagaccagaacaaacagaaggaagccagcagccaagccggggcagtttcagtctccaccccaaatgcaggactgtagaagcggccaggaagaaaaccaccccctcttaaggttgtttttgtgaccgttctttggagcattgttctaaaaatgggaaattacatattgctgtgccaagggcaacaaacacctgcagttaaaggaataccttccgcgaggcggcttttcggagcatgcatgtttatagctccagccaggccagaccgagggctgctgcataagccctgcttggtgcatttcttcacttgcaaggggacagagtgtgggcttaggtttgggactagagggggctttggcaactatggtgctcaggtgattatccttcgctcgtttatccaataaacatttatcaagcatctgaaaaaaaaaaaaaa

SEQ ID NO: 437 - DNA, 439 bp, Artificial Sequence
  Description of Artificial sequences:primer
  misc_feature (1)..(439): 5' terminal sequence from clone image:239937. glycine cleavage system protein h (aminomethyl carrier)(GCSH) gene.
  misc_feature (385)..(385): n is a, c, g, or t
  misc_feature (405)..(405): n is a, c, g, or t
  misc_feature (414)..(414): n is a, c, g, or t
atgttgtttattgtagtctccctgaagttgggacaaaattgaacaaacaagatgagtttggtgctttggaaagtgtgaaagctgctagtgaactctattctcctttatcaggagaagtaactgaaattaatgaagctcttgcagaaaatccaggacttgtaaacaaatcttgttatgaagatggttttgttttgttttgttttgttttgttttgttttgtttgagatggagtttcgctcttcttgtccaagctgggagtgcaatgggcacaatcttgggctcactgcaacctccgcctccccgggttcaagtgaattcttcttgcctcagccccctgagtagctgggggttgcagcacaggaaaaagaaggtaaagtagggagangggtccagttttccacattncagtgcctnaggcaggcaacacgggttgaggtgt

SEQ ID NO: 438 - DNA, 1151 bp, Artificial Sequence
  Description of Artificial sequences:primer
  misc_feature (1)..(1151): glycine cleavage system protein h (aminomethyl carrier)(GCSH) gene.
gcccgcctcccggcgcgggtggccgaggcgtagcgctgcgacccccgcacccctgcgaacatggcgctgcgagtggtgcggagcgtgcgggccctgctctgcaccctgcgcgcggtcccgttacccgccgcgccctgcccgccgaggccctggcagctgggggtgggcgccgtccgtacgctgcgcactggacccgctctgctctcggtgcgtaaattcacagagaaacacgaatgggtaacaacagaaaatggcattggaacagtgggaatcagcaattttgcacaggaagcgttgggagatgttgtttattgtagtctccctgaagttgggacaaaattgaacaaacaagatgagtttggtgctttggaaagtgtgaaagctgctagtgaactctattctcctttatcaggagaagtaactgaaattaatgaagctcttgcagaaaatccaggacttgtaaacaaatcttgttatgaagatggttggctgatcaagatgacactgagtaacccttcagaactagatgaacttatgagtgaagaagcatatgagaaatacataaaatctattgaggagtgaaaatggaactcctaaataaactagtatgaaataacgcaagccagcagagttgtcttaaattagtggtggatagaagacttagaatagaaacttttagtattaccgatggggaaaaaaaaactactgttaacactgctaatgaaagaaaatgccctttaactttctaatgattatagataaatataatatgcgtctttttcacaatatcctatgatttttagactaggctctagtgttcagaattcatgaaattatccatggtaaaaactagttataaaaattacataattcaaagataacattgttattcttaagccttatataatattgtaacttgcatgtatccatacctggatttgggatgaaatacttaatgatctttccattggaaataactggaagtgaagaggttttgttgcttgtacagtgtcagatgaggaacaccactatcttaattttgcgatacactgcatttgctggtgctatttttatacagtgaagcaacagctttgcagcaaaataataaaatacttcttcggaaaaaaaaaaaaaaaaaaaaaaaaaaaaaa

SEQ ID NO: 439 - DNA, 392 bp, Artificial Sequence
  Description of Artificial sequences:primer
  misc_feature (1)..(392): 3' terminal sequence from clone image:24067. ephb2(EPHB2) gene.
  misc_feature (138)..(138): n is a, c, g, or t
  misc_feature (191)..(191): n is a, c, g, or t
  misc_feature (218)..(218): n is a, c, g, or t
  misc_feature (297)..(297): n is a, c, g, or t
  misc_feature (320)..(320): n is a, c, g, or t
  misc_feature (373)..(373): n is a, c, g, or t
tttttttttttaaattaccggtacatttattctatgggatcctaaagagcttctccacaatgatgttatagctctgacatgatatgcaaagatgtccacaaaatattattatcaaaaattctcctcctgggcatggtngttcatgcctataattccaacactttgggaggctgaggtgggaggatcatttntggccacgagttcaagaccagcctggncaacatagtgagatcctgtctctctcggcagacggtgccattctcaacggcctcgaagcctgctttgcacatgcagcgnccgatgggacccagccacttcgnccgtcccctttacagtagagcttgatggggtacatccaccttcttccgcattnggggattgcagcttgcccc

SEQ ID NO: 440 - DNA, 4711 bp, Artificial Sequence
  Description of Artificial sequences:primer
  misc_feature (1)..(4711): ephb2(EPHB2) gene.
gccccgggaagcgcagccatggctctgcggaggctgggggccgcgctgctgctgctgccgctgctcgccgccgtggaagaaacgctaatggactccactacagcgactgctgagctgggctggatggtgcatcctccatcagggtgggaagaggtgagtggctacgatgagaacatgaacacgatccgcacgtaccaggtgtgcaacgtgtttgagtcaagccagaacaactggctacggaccaagtttatccggcgccgtggcgcccaccgcatccacgtggagatgaagttttcggtgcgtgactgcagcagcatccccagcgtgcctggctcctgcaaggagaccttcaacctctattactatgaggctgactttgactcggccaccaagaccttccccaactggatggagaatccatgggtgaaggtggataccattgcagccgacgagagcttctcccaggtggacctgggtggccgcgtcatgaaaatcaacaccgaggtgcggagcttcggacctgtgtcccgcagcggcttctacctggccttccaggactatggcggctgcatgtccctcatcgccgtgcgtgtcttctaccgcaagtgcccccgcatcatccagaatggcgccatcttccaggaaaccctgtcgggggctgagagcacatcgctggtggctgcccggggcagctgcatcgccaatgcggaagaggtggatgtacccatcaagctctactgtaacggggacggcgagtggctggtgcccatcgggcgctgcatgtgcaaagcaggcttcgaggccgttgagaatggcaccgtctgccgaggttgtccatctgggactttcaaggccaaccaaggggatgaggcctgtacccactgtcccatcaacagccggaccacttctgaaggggccaccaactgtgtctgccgcaatggctactacagagcagacctggaccccctggacatgccctgcacaaccatcccctccgcgccccaggctgtgatttccagtgtcaatgagacctccctcatgctggagtggacccctccccgcgactccggaggccgagaggacctcgtctacaacatcatctgcaagagctgtggctcgggccggggtgcctgcacccgctgcggggacaatgtacagtacgcaccacgccagctaggcctgaccgagccacgcatttacatcagtgacctgctggcccacacccagtacaccttcgagatccaggctgtgaacggcgttactgaccagagccccttctcgcctcagttcgcctctgtgaacatcaccaccaaccaggcagctccatcggcagtgtccatcatgcatcaggtgagccgcaccgtggacagcattaccctgtcgtggtcccagccggaccagcccaatggcgtgatcctggactatgagctgcagtactatgagaaggagctcagtgagtacaacgccacagccataaaaagccccaccaacacggtcaccgtgcagggcctcaaagccggcgccatctatgtcttccaggtgcgggcacgcaccgtggcaggctacgggcgctacagcggcaagatgtacttccagaccatgacagaagccgagtaccagacaagcatccaggagaagttgccactcatcatcggctcctcggccgctggcctggtcttcctcattgctgtggttgtcatcgccatcgtgtgtaacagaagacgggggtttgagcgtgctgactcggagtacacggacaagctgcaacactacaccagtggccacatgaccccaggcatgaagatctacatcgatcctttcacctacgaggaccccaacgaggcagtgcgggagtttgccaaggaaattgacatctcctgtgtcaaaattgagcaggtgatcggagcaggggagtttggcgaggtctgcagtggccacctgaagctgccaggcaagagagagatctttgtggccatcaagacgctcaagtcgggctacacggagaagcagcgccgggacttcctgagcgaagcctccatcatgggccagttcgaccatcccaacgtcatccacctggagggtgtcgtgaccaagagcacacctgtgatgatcatcaccgagttcatggagaatggctccctggactcctttctccggcaaaacgatgggcagttcacagtcatccagctggtgggcatgcttcggggcatcgcagctggcatgaagtacctggcagacatgaactatgttcaccgtgacctggctgcccgcaacatcctcgtcaacagcaacctggtctgcaaggtgtcggactttgggctctcacgctttctagaggacgatacctcagaccccacctacaccagtgccctgggcggaaagatccccatccgctggacagccccggaagccatccagtaccggaagttcacctcggccagtgatgtgtggagctacggcattgtcatgtgggaggtgatgtcctatggggagcggccctactgggacatgaccaaccaggatgtaatcaatgccattgagcaggactatcggctgccaccgcccatggactgcccgagcgccctgcaccaactcatgctggactgttggcagaaggaccgcaaccaccggcccaagttcggccaaattgtcaacacgctagacaagatgatccgcaatcccaacagcctcaaagccatggcgcccctctcctctggcatcaacctgccgctgctggaccgcacgatccccgactacaccagctttaacacggtggacgagtggctggaggccatcaagatggggcagtacaaggagagcttcgccaatgccggcttcacctcctttgacgtcgtgtctcagatgatgatggaggacattctccgggttggggtcactttggctggccaccagaaaaaaatcctgaacagtatccaggtgatgcgggcgcagatgaaccagattcagtctgtggaggtttgacattcacctgcctcggctcacctcttcctccaagccccgccccctctgccccacgtgccggccctcctggtgctctatccactgcagggccagccactcgccaggaggccacgggccacgggaagaaccaagcggtgccagccacgagacgtcaccaagaaaacatgcaactcaaacgacggaaaaaaaaagggaatgggaaaaaagaaaacagatcctgggagggggcgggaaatacaaggaatattttttaaagaggattctcataaggaaagcaatgactgttcttgcgggggataaaaaagggcttgggagattcatgcgatgtgtccaatcggagacaaaagcagtttctctccaactccctctgggaaggtgacctggccagagccaagaaacactttcagaaaaacaaatgtgaaggggagagacaggggccgcccttggctcctgtccctgctgctcctctaggcctcactcaacaaccaagcgcctggaggacgggacagatggacagacagccaccctgagaacccctctgggaaaatctattcctgccaccactgggcaaacagaagaatttttctgtctttggagagtattttagaaactccaatgaaagacactgtttctcctgttggctcacagggctgaaaggggcttttgtcctcctgggtcagggagaacgcggggaccccagaaaggtcagccttcctgaggatgggcaacccccaggtctgcagctccaggtacatatcacgcgcacagcctggcagcctggccctcctggtgcccactcccgccagcccctgcctcgaggactgatactgcagtgactgccgtcagctccgactgccgctgagaagggttgatcctgcatctgggtttgtttacagcaattcctggactcgggggtattttggtcacagggtggttttggtttagggggtttgtttgttgggttgttttttgttttttggttttttttaatgacaatgaagtgacactttgacatttcctaccttttgaggacttgatccttctccaggaagaaggtgctttctgcttactgacttaggcaatacaccaagggcgagattttatatgcacatttctggatttttttatacggttttcattgacactcttccctcctcccacctgccaccaggcctcaccaaagcccactgccatggggccatctgggccattcagagactggagtgagatttgggtgtggagggggaggcgccaaggtggaggagcttcccactccaggactgttgatgaaagggacagattgaggaggaagtgggctctgaggctgcagggctggaagtccttgcccacttcccactctcctgccccaatctatctagtacttcccaggcaaataggcccctttgaggctcctgagtgccctcagatggtcaaaacccagttttccctctgggagcctaaaccaggctgcatcggaggccaggacccggatcattcactgtgataccctgccctccagagggtgcgctcagagacacgggcaagcatgcctcttcccttccctggagagaaagtgtgtgatttctctcccacctccttccccccaccagacctttgctgggcctaaaggtcttggccatggggacgccctcagtctagggatctggccacagactccctcctgtgaaccaacacagacacccaagcagagcaatcagttagtgaattg

SEQ ID NO: 441 - DNA, 438 bp, Artificial Sequence
  Description of Artificial sequences:primer
  misc_feature (1)..(438): 3' terminal sequence from clone image:240753.
  misc_feature (42)..(42): n is a, c, g, or t
  misc_feature (58)..(58): n is a, c, g, or t
  misc_feature (89)..(89): n is a, c, g, or t
  misc_feature (175)..(175): n is a, c, g, or t
  misc_feature (209)..(211): n is a, c, g, or t
  misc_feature (213)..(213): n is a, c, g, or t
  misc_feature (219)..(220): n is a, c, g, or t
  misc_feature (224)..(224): n is a, c, g, or t
  misc_feature (269)..(270): n is a, c, g, or t
  misc_feature (272)..(272): n is a, c, g, or t
  misc_feature (278)..(278): n is a, c, g, or t
  misc_feature (288)..(288): n is a, c, g, or t
  misc_feature (291)..(291): n is a, c, g, or t
  misc_feature (294)..(295): n is a, c, g, or t
  misc_feature (307)..(308): n is a, c, g, or t
  misc_feature (322)..(322): n is a, c, g, or t
  misc_feature (325)..(326): n is a, c, g, or t
  misc_feature (331)..(331): n is a, c, g, or t
  misc_feature (333)..(333): n is a, c, g, or t
  misc_feature (346)..(346): n is a, c, g, or t
  misc_feature (350)..(350): n is a, c, g, or t
  misc_feature (352)..(352): n is a, c, g, or t
  misc_feature (356)..(356): n is a, c, g, or t
  misc_feature (359)..(359): n is a, c, g, or t
  misc_feature (364)..(364): n is a, c, g, or t
  misc_feature (367)..(367): n is a, c, g, or t
  misc_feature (370)..(370): n is a, c, g, or t
  misc_feature (379)..(379): n is a, c, g, or t
  misc_feature (384)..(384): n is a, c, g, or t
  misc_feature (387)..(387): n is a, c, g, or t
  misc_feature (391)..(391): n is a, c, g, or t
  misc_feature (393)..(393): n is a, c, g, or t
  misc_feature (399)..(399): n is a, c, g, or t
  misc_feature (407)..(407): n is a, c, g, or t
  misc_feature (409)..(409): n is a, c, g, or t
  misc_feature (421)..(421): n is a, c, g, or t
gtagagacagggtttcactctgttagccagcatggtcttganctcctgaccttgtganccgcccacctctgcctcccaaagtactaggnttacaggtgggagccactgcacccagctgcagatattttattgaatcttatttttggcaggttgataacagggattttttgctgantaagataggtttggccctgatgagagttacacannnangtaaanntaangtatctttactgtgtatgtctcatgagactttcagtcattgcagnncntacttntgcacacttnganggnntttttccttctnntccttttttgcatnggnnttcantntttctctttttantggntntttnccncgggntgntgnggtgttttnttganggnccgngngccttnccccaggntngcgcaggtgttncccggggggttgctctt

SEQ ID NO: 442 - DNA, 371 bp, Artificial Sequence
  Description of Artificial sequences:primer
  misc_feature (1)..(371): 5' terminal sequence from clone image:240753.
  misc_feature (258)..(258): n is a, c, g, or t
  misc_feature (267)..(267): n is a, c, g, or t
  misc_feature (294)..(294): n is a, c, g, or t
  misc_feature (304)..(304): n is a, c, g, or t
  misc_feature (319)..(319): n is a, c, g, or t
  misc_feature (366)..(366): n is a, c, g, or t
gatggagtttcgctcttgtagcccaggctggagtgcaatggccgttctcagctcactgcaacctccgcctcccgggttcaagcaattctccaatgtcaaggaaatcttagaaagtttcaaggtaaatttggtctttcacaagcttgatgaacaaagagaagcaaccctcgagtaacacttgcgctatacttgaggaaatggcactcagttcttcaataaaacaactcatcattccgttgtaaataaccattaaaaagngaaatattngatttctatggcaaaaaaggtttagtngggaaaaatnttctttcatagtgtngcataagtatgtttcttgcaatgtctgaaagtcttcatgtgtacatncacag

SEQ ID NO: 443 - DNA, 374 bp, Artificial Sequence
  Description of Artificial sequences:primer
  misc_feature (1)..(374): 3' terminal sequence from clone image:24085. tripeptidyl peptidase ii(TPP2) gene.
ttttttttttaagaagcttcaatattcacttttattatttataaaaaaaaattaaggtaccacgagtgcatattggtgtactgtgatcttggttttgcaaatttattcatgtgttttacattatttcaattttaataaacatatcatatgtgtatctttacaatacctgataaagattcagctgtctggcacttacacatgtattcatagagttcattctgatgctctgaacctcaagaggatgtgaaaatgacttgcctgtaattaccccaagatgaagatttattgaagcagttatgctccagcaacttgccactcatttgtgctggttctactttttccccttaattgaatgtaaacatttgccaaaaaaa

SEQ ID NO: 444 - DNA, 471 bp, Artificial Sequence
  Description of Artificial sequences:primer
  misc_feature (1)..(471): 5' terminal sequence from clone image:24085. tripeptidyl peptidase ii(TPP2) gene.
  misc_feature (283)..(284): n is a, c, g, or t
  misc_feature (371)..(371): n is a, c, g, or t
  misc_feature (382)..(382): n is a, c, g, or t
  misc_feature (396)..(396): n is a, c, g, or t
  misc_feature (417)..(417): n is a, c, g, or t
  misc_feature (449)..(449): n is a, c, g, or t
  misc_feature (466)..(466): n is a, c, g, or t
tgagcttagatattcatgaaaatcatagttttgcacttctagggaagaagaaatcaagcaatttgacattaccacccaaatataaccagccattctttgttacttccttacctgatgataaaatacctaaaggggcaggacctggatgctatcttgcaggatccttaacattgtcaaagactgaactaggaaagaaagctgatgtaatccctgttcattactacttaatacctccaccaacaaagactaagaatggcagcaaagataaggaaaaagattcagnnaaagagaaagatttaaaagaagagtttactgaagcattacgagatcttaaaattcagtgggatgacaaagctgggattctagtgacntttataacganttgaaaggaacatntcctaattatcttccactgtncgttgcacgactttcgtccattgggatgctgnaaagggaacggattganaaagg

SEQ ID NO: 445 - DNA, 4626 bp, Artificial Sequence
  Description of Artificial sequences:primer
  misc_feature (1)..(4626): tripeptidyl peptidase ii(TPP2) gene.
gaattcccctccatcctgcgtccatggccaccgctgcgactgaggagcccttcccttttcacggtctcctgccgaagaaggagaccggagccgcctccttcctctgccgctacccggagtatgatgggcggggggtgctcatcgcagtcctggacacgggggtcgacccgggggctccgggcatgcaggttacaactgatggaaaaccaaaaatcgttgatatcattgatacaacaggaagtggcgatgtgaatactgctacagaagtagagccaaaggatggtgagattgttggcctttcaggaagagtgcttaagattcctgcaagctggacaaatccctcaggcaaatatcatattggcataaaaaatggctatgacttctatcctaaggcactcaaggaaaggatacagaaagaacggaaggaaaaaatctgggaccctgttcacagagtggcccttgcagaagcctgtagaaaacaggaagaatttgatgttgccaacaacggctcttctcaagcaaataaactaatcaaggaggaacttcaaagtcaagtggaattgctaaattcttttgagaagaaatacagcgatcctggccctgtatatgactgcttggtatggcatgatggcgaagtctggagagcctgcattgattctaatgaagatggggacttgagtaaatctaccgtgttgagaaactacaaagaagcccaagaatatggctcttttggcacagctgagatgttgaattactccgttaatatatacgatgatagaaacctgctctccattgtgaccagtggaggagctcatgggacacatgtagctagtatagctgctggacactttccagaagaacctgaacggaatggggtagctcctggtgctcaaattctttccatcaagattggtgatacaagactaagcacaatggaaacaggcacaggcctcataagagctatgatagaagttataaatcataagtgtgatcttgtcaactacagttacggagaagcaactcactggccaaattctgggagaatttgtgaagtaattaatgaagcagtatggaagcataatataatttatgtttcaagtgctggaaataatggtccatgcctgtctacagttggttgtccaggtggaactacatcaagtgtgataggtgttggtgcttatgtttctcctgatatgatggttgctgagtattcactgagagagaaattacctgcaaatcaatatacttggtcttctagaggacctagtgctgacggggcccttggtgtgagtatcagtgcgccaggaggagccattgcttctgttcctaactggacactgagagggacgcagctgatgaatggaacatctatgtcttcccccaatgcatgtggaggcattgccctgatcctttcaggtctgaaagctaataacattgactacacagttcattcagtcagaagagctctagaaaacactgcagtgaaggctgacaatatagaagtatttgctcaaggacatggtattattcaggttgataaagcctatgactacctcgttcagaatacatcatttgctaataaattaggttttactgttactgttggaaataaccgtggcatctacctccgagatcctgttcaggtggctgcaccttcagatcatggcgttggcattgaacctgtatttccggagaacacagaaaactctgaaaaaatatcccttcagcttcatttagctctgacttcaaattcatcttgggttcagtgtcccagccatttggaactcatgaatcaatgtagacacataaacatacgtgtggatcccaggggcttaagagaaggattgcattatacagaggtatgtggctatgatatagcatcccctaacgcaggtccgctcttcagagttccgatcactgcagttatagcagcaaaagtaaatgaatcatcacattatgatctagcctttacagatgtacactttaaacctggtcaaattcgaaggcattttattgaggttcctgagggtgcaacatgggctgaagtgacagtgtgttcgtgttcttctgaggtgtcagcaaagtttgttctacatgcagtccagcttgtgaagcaaagagcatatcgaagccatgaattctataagttttgttctcttccagagaaaggaacactgactgaagcttttcctgtcctaggtggaaaagcaattgaattttgcattgctcgttggtgggcaagtctcagtgatgtcaacattgattataccatttctttccatgggatagtgtgtactgctcctcagttaaacattcatgcatcggaaggaatcaaccgctttgatgttcagtcctccttgaaatacgaagatctggctccctgcataactttgaagaactgggtccaaacactgcgcccagtgagtgcaaaaacaaaacctttaggatcaagagatgttttgccaaataaccgtcaactttatgagatggtcctgacatataactttcatcaacccaagagtggggaagtaactccaagctgcccactactttgtgaactattatatgaatctgaatttgacagccaactgtggattatttttgaccagaacaaaagacagatgggttcaggcgatgcctatccacatcagtattctttgaaactggagaaaggagattatacaattcgactacagattcgccatgagcaaatcagtgatttggaacgccttaaagaccttccatttattgtttctcatagattgtctaataccttgagcttagatattcatgaaaatcatagttttgcacttctagggaagaagaaatcaagcaatttgacattaccacccaaatataaccagccattctttgttacttccttacctgatgataaaatacctaaaggggcaggacctggatgctatcttgcaggatccttaacattgtcaaagactgaactaggaaagaaagctgatgtaatccctgttcattactacttaatacctccaccaacaaagactaagaatggcagcaaagataaggaaaaagattcagaaaaagagaaagatttaaaagaagagtttactgaagcattacgagatcttaaaattcagtggatgacaaagctggattctagtgacatttataacgaattgaaagaaacatatcctaattatcttcctctgtacgttgcacgacttcatcaattggatgctgaaaaggaacgaatgaaaagacttaatgaaattgttgatgcggcaaatgctgttatttctcatatagatcaaacagccctagcagtttatattgcaatgaagactgatcccaggcctgatgcagctactataaaaaatgacatggacaaacaaaaatccaccctcgtagatgccctttgtaggaaaggttgtgccctggcagaccatcttcttcacacccaggctcaagacggagccatttccactgatgcagaaggaaaggaggaggaaggagaaagtcctttggattctctggcagaaacattttgggaaactactaaatggactgatctctttgacaataaggttttgacatttgcatataaacatgcattagtaaataaaatgtatgggagaggccttaaatttgcaactaaacttgtggaagaaaaaccaacaaaagaaaactggaaaaattgtattcaactgatgaagttacttggatggacccattgtgcatcttttactgaaaactggctccccatcatgtatcctcccgattattgcgtattctaaaataggaaacaagactttaaattttaaaaaaggaagttttatagtgaatgggtataaaaacaaatttgtggcatttttagtctaatgcatgttttcatccactatccagtactgattattaaaatgacatgtatttatcagagaattcactgacgtgtggcttaatacatgtaaatctagacctctgacatcatggtgttttcttaatgcctcacattgctggcacggggatgtgccctgcctgccagcacctaggacttcgagttgggttgcagcttatgacatgcatgataggttttggaaggtaacttttaactgcaaacctataaagtactattttttattttataaatgaacagggttttaacgtgctcaactttaatttttttcaattgtatgaaggccttaaaaaagctacattaagcgtagctaaaattatttattggactaaaaactaacagaacttcatttccagaattttttttttttttttttttttggcaaatgtttacattcaattaaggggaaaaagtagaaccagcacaaatgagtggcagttgctggagcataactgcttcaataaatcttcatcttggggtaattacaggcaagtcattttcacatcctcttgaggttcagagcatcagaatgaactctatgaatacatgtgtaagtgccagacagctgaatctttatcaggtattgtaaagatacacatatgatatgtttattaaaattgaaataatgtaaaacacatgaataaatttgcaaaaccaagatcacagtacaccatatgcactctggtaccttaatttttttttataaataataaaagtgaatattgaagcttctt

SEQ ID NO: 446 - DNA, 312 bp, Artificial Sequence
  Description of Artificial sequences:primer
  misc_feature (1)..(312): 3' terminal sequence from clone image:241151. tripeptidyl peptidase ii(TPP2) gene.
  misc_feature (114)..(114): n is a, c, g, or t
  misc_feature (225)..(225): n is a, c, g, or t
  misc_feature (293)..(293): n is a, c, g, or t
aataatcagtactggatagtggatgaaaacatgcattagactaaaaatgccacaaatttgtttttatacccattcactataaaacttccttttttaaaatttaaagtcttgttncctattttagaatacgcaataatcgggaggatacatgatggggagccagttttcagtaaaagatgcacaatgggtccatccaagtaacttcatcagttgaatacaattttnccagttttcttttgttgggtttttcctccacaagtttagttggcaaatttaaggcctctcccatacantttaatttactaaggcagg

SEQ ID NO: 447 - DNA, 397 bp, Artificial Sequence
  Description of Artificial sequences:primer
  misc_feature (1)..(397): 5' terminal sequence from clone image:241151. tripeptidyl peptidase ii(TPP2) gene.
  misc_feature (342)..(342): n is a, c, g, or t
  misc_feature (366)..(366): n is a, c, g, or t
  misc_feature (381)..(381): n is a, c, g, or t
  misc_feature (389)..(389): n is a, c, g, or t
agagtaaagcattacatttatttgtcctagtcatgaactgaaagttttaagacataacctctgggtatacacatagacaaatgtgtaatgattactatttataagaaaactgaaaactcaaaagtcgtttacctgattaagagttatatagctaaaaaaatttagaatagtgattaacctttcaactctgttgcttctggcattccgtttcaaccaggtgcagctaccctaactcatttaatctatatgtgtaatatagtagctcatttgatgtttattaataaggcatcatatttgatgtacaatacaattgtacgtacctgggatatacagtatttctgncattataaatcttagggcaaaagnatacatggaatttanattcaggntaaggatt

SEQ ID NO: 448 - DNA, 368 bp, Artificial Sequence
  Description of Artificial sequences:primer
  misc_feature (1)..(368): 3' terminal sequence from clone image:24125. iq motif containing gtpase activating protein 1(IQGAP1) gene.
  misc_feature (54)..(54): n is a, c, g, or t
  misc_feature (95)..(95): n is a, c, g, or t
  misc_feature (111)..(111): n is a, c, g, or t
  misc_feature (189)..(189): n is a, c, g, or t
  misc_feature (196)..(196): n is a, c, g, or t
  misc_feature (198)..(198): n is a, c, g, or t
  misc_feature (290)..(290): n is a, c, g, or t
  misc_feature (332)..(332): n is a, c, g, or t
  misc_feature (341)..(341): n is a, c, g, or t
ttttttttttttttttacagctgaccgtttattacccctgctctagatacccgnttgctgtctgtgtgataggttctgaaatacctgaatgcagnaaatggcagggatttntttcttcaggaaattcatcctggatcggaattcctgtcgaactaagtatccacggcagcgagcctgcagcctggtgancaggccngnattggccagccacagctgttctcggttatatgcggcagtcaccccagagatagaactctggatctcctcccgagaaagctgcatagaatttngcacaaaatttggaggttcatcccatcctccttcctggggtntccagattntgggtaataataatatccaccttttac

SEQ ID NO: 449 - DNA, 203 bp, Artificial Sequence
  Description of Artificial sequences:primer
  misc_feature (1)..(203): 5' terminal sequence from clone image:24125. iq motif containing gtpase activating protein 1(IQGAP1) gene.
  misc_feature (2)..(2): n is a, c, g, or t
  misc_feature (112)..(112): n is a, c, g, or t
  misc_feature (146)..(146): n is a, c, g, or t
  misc_feature (179)..(179): n is a, c, g, or t
  misc_feature (193)..(193): n is a, c, g, or t
  misc_feature (200)..(200): n is a, c, g, or t
tnaaggaatataaacaaagtcaatacattttctgcattagaaatatcgcctggctttagaacaaggagatgcactggccttgttcagggctctgcagtcaccagccctgggnttctgaggactgcagcaacagaatagcgactggnacttgaagcagctcctgagtgataaacagcagnagagacagagtggncagactnacc

SEQ ID NO: 450 - DNA, 7179 bp, Artificial Sequence
  Description of Artificial sequences:primer
  misc_feature (1)..(7179): iq motif containing gtpase activating protein 1(IQGAP1) gene.
ggagctgtacgtaccgccgtccgcgcctccaaggtttcacggcttcctcagcagagactcgggctcgtccgccatgtccgccgcagacgaggttgacgggctgggcgtggcccggccgcactatggctctgtcctggataatgaaagacttactgcagaggagatggatgaaaggagacgtcagaacgtggcttatgagtacctttgtcatttggaagaagcgaagaggtggatggaagcatgcctaggggaagatctgcctcccaccacagaactggaggaggggcttaggaatggggtctaccttgccaaactggggaacttcttctctcccaaagtagtgtccctgaaaaaaatctatgatcgagaacagaccagatacaaggcgactggcctccactttagacacactgataatgtgattcagtggttgaatgccatggatgagattggattgcctaagattttttacccagaaactacagatatctatgatcgaaagaacatgccaagatgtatctactgtatccatgcactcagtttgtacctgttcaagctaggcctggcccctcagattcaagacctatatggaaaggttgacttcacagaagaagaaatcaacaacatgaagactgagttggagaagtatggcatccagatgcctgcctttagcaagattgggggcatcttggctaatgaactgtcagtggatgaagccgcattacatgctgctgttattgctattaatgaagctattgaccgtagaattccagccgacacatttgcagctttgaaaaatccgaatgccatgcttgtaaatcttgaagagcccttggcatccacttaccaggatatactttaccaggctaagcaggacaaaatgacaaatgctaaaaacaggacagaaaactcagagagagaaagagatgtttatgaggagctgctcacgcaagctgaaattcaaggcaatataaacaaagtcaatacattttctgcattagcaaatatcgacctggctttagaacaaggagatgcactggccttgttcagggctctgcagtcaccagccctggggcttcgaggactgcagcaacagaatagcgactggtacttgaagcagctcctgagtgataaacagcagaagagacagagtggtcagactgaccccctgcagaaggaggagctgcagtctggagtggatgctgcaaacagtgctgcccagcaatatcagagaagattggcagcagtagcactgattaatgctgcaatccagaagggtgttgctgagaagactgttttggaactgatgaatcccgaagcccagctgccccaggtgtatccatttgccgccgatctctatcagaaggagctggctaccctgcagcgacaaagtcctgaacataatctcacccacccagagctctctgtcgcagtggagatgttgtcatcggtggccctgatcaacagggcattggaatcaggagatgtgaatacagtgtggaagcaattgagcagttcagttactggtcttaccaatattgaggaagaaaactgtcagaggtatctcgatgagttgatgaaactgaaggctcaggcacatgcagagaataatgaattcattacatggaatgatatccaagcttgcgtggaccatgtgaacctggtggtgcaagaggaacatgagaggattttagccattggtttaattaatgaagccctggatgaaggtgatgcccaaaagactctgcaggccctacagattcctgcagctaaacttgagggagtccttgcagaagtggcccagcattaccaagacacgctgattagagcgaagagagagaaagcccaggaaatccaggatgagtcagctgtgttatggttggatgaaattcaaggtggaatctggcagtccaacaaagacacccaagaagcacagaagtttgccttaggaatctttgccattaatgaggcagtagaaagtggtgatgttggcaaaacactgagtgcccttcgctcccctgatgttggcttgtatggagtcatccctgagtgtggtgaaacttaccacagtgatcttgctgaagccaagaagaaaaaactggcagtaggagataataacagcaagtgggtgaagcactgggtaaaaggtggatattattattaccacaatctggagacccaggaaggaggatgggatgaacctccaaattttgtgcaaaattctatgcagctttctcgggaggagatccagagttctatctctggggtgactgccgcatataaccgagaacagctgtggctggccaatgaaggcctgatcaccaggctgcaggctcgctgccgtggatacttagttcgacaggaattccgatccaggatgaatttcctgaagaaacaaatccctgccatcacctgcattcagtcacagtggagaggatacaagcagaagaaggcatatcaagatcggttagcttacctgcgctcccacaaagatgaagttgtaaagattcagtccctggcaaggatgcaccaagctcgaaagcgctatcgagatcgcctgcagtacttccgggaccatataaatgacattatcaaaatccaggcttttattcgggcaaacaaagctcgggatgactacaagactctcatcaatgctgaggatcctcctatggttgtggtccgaaaatttgtccacctgctggaccaaagtgaccaggattttcaggaggagcttgaccttatgaagatgcgggaagaggttatcaccctcattcgttctaaccagcagctggagaatgacctcaatctcatggatatcaaaattggactgctagtgaaaaataagattacgttgcaggatgtggtttcccacagtaaaaaacttaccaaaaaaaataaggaacagttgtctgatatgatgatgataaataaacagaagggaggtctcaaggctttgagcaaggagaagagagagaagttggaagcttaccagcacctgttttatttattgcaaaccaatcccacctatctggccaagctcatttttcagatgccccagaacaagtccaccaagttcatggactctgtaatcttcacactctacaactacgcgtccaaccagcgagaggagtacctgctcctgcggctctttaagacagcactccaagaggaaatcaagtcgaaggtagatcagattcaagagattgtgacaggaaatcctacggttattaaaatggttgtaagtttcaaccgtggtgcccgtggccagaatgccctgagacagatcttggccccagtcgtgaaggaaattatggatgacaaatctctcaacatcaaaactgaccctgtggatatttacaaatcttgggttaatcagatggagtctcagacaggagaggcaagcaaactgccctatgatgtgacccctgagcaggcgctagctcatgaagaagtgaagacacggctagacagctccatcaggaacatgcgggctgtgacagacaagtttctctcagccattgtcagctctgtggacaaaatcccttatgggatgcgcttcattgccaaagtgctgaaggactcgttgcatgagaagttccctgatgctggtgaggatgagctgctgaagattattggtaacttgctttattatcgatacatgaatccagccattgttgctcctgatgcctttgacatcattgacctgtcagcaggaggccagcttaccacagaccaacgccgaaatctgggctccattgcaaaaatgcttcagcatgctgcttccaataagatgtttctgggagataatgcccacttaagcatcattaatgaatatctttcccagtcctaccagaaattcagacggtttttccaaactgcttgtgatgtcccagagcttcaggataaatttaatgtggatgagtactctgatttagtaaccctcaccaaaccagtaatctacatttccattggtgaaatcatcaacacccacactctcctgttggatcaccaggatgccattgctccggagcacaatgatccaatccacgaactgctggacgacctcggcgaggtgcccaccatcgagtccctgataggggaaagctctggcaatttaaatgacccaaataaggaggcactggctaagacggaagtgtctctcaccctgaccaacaagttcgacgtgcctggagatgagaatgcagaaatggatgctcgaaccatcttactgaatacaaaacgtttaattgtggatgtcatccggttccagccaggagagaccttgactgaaatcctagaaacaccagccaccagtgaacaggaagcagaacatcagagagccatgcagagacgtgctatccgtgatgccaaaacacctgacaagatgaaaaagtcaaaatctgtaaaggaagacagcaacctcactcttcaagagaagaaagagaagatccagacaggtttaaagaagctaacagagcttggaaccgtggacccaaagaacaaataccaggaactgatcaacgacattgccagggatattcggaatcagcggaggtaccgacagaggagaaaggccgaactagtgaaactgcaacagacatacgctgctctgaactctaaggccaccttttatggggagcaggtggattactataaaagctatatcaaaacctgcttggataacttagccagcaagggcaaagtctccaaaaagcctagggaaatgaaaggaaagaaaagcaaaaagatttctctgaaatatacagcagcaagactacatgaaaaaggagttcttctggaaattgaggacctgcaagtgaatcagtttaaaaatgttatatttgaaatcagtccaacagaagaagttggagacttcgaagtgaaagccaaattcatgggagttcaaatggagacttttatgttacattatcaggacctgctgcagctacagtatgaaggagttgcagtcatgaaattatttgatagagctaaagtaaatgtcaacctcctgatcttccttctcaacaaaaagttctacgggaagtaattgatcgtttgctgccagcccagaaggatgaaggaaagaagcacctcacagctcctttctaggtccttctttcctcattggaagcaaagacctagccaacaacagcacctcaatctgatacactcccgatgccacatttttaactcctctcgctctgatgggacatttgttacccttttttcatagtgaaattgtgtttcaggcttagtctgacctttctggtttcttcattttcttccattacttaggaaagagtggaaactccactaaaatttctctgtgttgttacagtcttagaggttgcagtactatattgtaagctttggtgtttgtttaattagcaatagggatggtaggattcaaatgtgtgtcatttagaagtggaagctattagcaccaatgacataaatacatacaagacacagaactaaaatgtcatgttattaacagttattaggttgtcatttaaaaataaagttcctttatatttctgtcccatcaggaaaactgaaggatatggggaatcattggttatcttccattgtgtttttctttatggacaggagctaatggaagtgacagtcatgttcaaaggaagcatttctagaaaaaaggagataatgtttttaaatttcattatcaaacttgggcaattctgtttgtgtaactccccgactagtggatgggagagtcccattgctaaaattcagctactcagataaattcagaatgggtcaaggcacctgcctgtttttgttggtgcacagagattgacttgattcagagagacaattcactccatccctatggcagaggaatgggttagccctaatgtagaatgtcattgtttttaaaactgttttatatcttaagagtgccttattaaagtatagatgtatgtcttaaaatgtgggtgataggaattttaaagatttatataatgcatcaaaagccttagaataagaaaagctttttttaaattgctttatctgtatatctgaactcttgaaacttatagctaaaacactaggatttatctgcagtgttgcagggagataattctgccttaaattgtctaaaacaaaaacaaaaccagccaacctatgttacacgtgagattaaaaccaattttttccccattttttctccttttttctcttgctgcccacattgtgcctttattttatgagccccagttttctgggcttagtttaaaaaaaaaatcaagtctaaacattgcatttagaaagcttttgttcttggataaaaagtcatacactttaaaaaaaaaaaaaaaactttttccaggaaaatatattgaaatcatgctgctgagcctctattttctttctttgatgttttgattcagtattcttttatcataaatttttagcatttaaaaattcactgatgtacattaagccaataaactgctttaatgaataacaaactatgtagtgtgtccctattataaatgcattggagaagtatttttatgagactctttactcaggtgcatggttacagccacagggaggcatggagtgccatggaaggattcgccactacccagaccttgttttttgttgtattttggaagacaggttttttaaagaaacattttcctcagattaaaagatgatgctattacaactagcattgcctcaaaaactgggaccaaccaaagtgtgtcaaccctgtttccttaaaagaggctatgaatcccaaaggccacatccaagacaggcaataatgagcagagtttacagctcctttaataaaatgtgtcagtaattttaaggtttatagttccctcaacacaattgctaatgcagaatagtgtaaaatgcgcttcaagaatgttgatgatgatgatatagaattgtggctttagtagcacagaggatgccccaacaaactcatggcgttgaaaccacacagttctcattactgttatttattagctgtagcattctctgtctcctctctctcctcctttgaccttctcctcgaccagccatcatgacatttaccatgaatttacttcctcccaagagtttggactgcccgtcagattgtttctgcacatagttgcctttgtatctctgtatgaaataaaaggtcatttgttc

SEQ ID NO: 451 - DNA, 334 bp, Artificial Sequence
  Description of Artificial sequences:primer
  misc_feature (1)..(334): 3' terminal sequence from clone image:241788. fibrinogen, b beta polypeptide(FGB) gene.
  misc_feature (7)..(7): n is a, c, g, or t
  misc_feature (60)..(60): n is a, c, g, or t
  misc_feature (63)..(63): n is a, c, g, or t
  misc_feature (70)..(70): n is a, c, g, or t
  misc_feature (76)..(77): n is a, c, g, or t
  misc_feature (102)..(102): n is a, c, g, or t
  misc_feature (104)..(108): n is a, c, g, or t
  misc_feature (110)..(110): n is a, c, g, or t
  misc_feature (112)..(113): n is a, c, g, or t
  misc_feature (116)..(118): n is a, c, g, or t
  misc_feature (123)..(123): n is a, c, g, or t
  misc_feature (137)..(138): n is a, c, g, or t
  misc_feature (263)..(263): n is a, c, g, or t
  misc_feature (293)..(293): n is a, c, g, or t
ggcagtntaagaggagtttcctgacaaaaatgtggaagctaaagataagggaagaaaggnagnaaccccncaaaannaaaattttatttttggtgagatttnannnnntntnnctnnnagganaaaaaacgccccgnnatgataaaattagccagcttaccaggatgggacccacagaacttttgatagaaatggaggactggaaaggagacaaagtaaaggctcactatggaggattcactgtacagaatgaagccaacacntaccagatctcagtgaacaaatacagaggnacagccggtaatgccctcatggatggagcatctcagcctac

SEQ ID NO: 452 - DNA, 440 bp, Artificial Sequence
  Description of Artificial sequences:primer
  misc_feature (1)..(440): 5' terminal sequence from clone image:241788. fibrinogen, b beta polypeptide(FGB) gene.
  misc_feature (316)..(316): n is a, c, g, or t
  misc_feature (431)..(431): n is a, c, g, or t
tggaataatagcttttacaacccttagtatcagagaaccctggaaatgaaaatgaaagttttcacacacactttagaatatagagatataggtatttatctaaatgctcattattcagaaagtaactgtgctcaaattctagttttatctctgggtagttgtgtgacattggacaaatcacgtaatctctctaaatctcatctgtaaaatgagaataagaatgtctaccttatagttgaaatgctttcgagtgatgcataaagagcttaggacagtggctgacagtaagtgcccagggaagtggtagctattaaanatattgttaatgattctgagtaatgatattagtgtgatttttaaagcaggagcaaagagtgccacacataccagccgttcattgtctctgtcctacgtgctgtaggtacctgccnttgtggaat

SEQ ID NO: 453 - DNA, 506 bp, Artificial Sequence
  Description of Artificial sequences:primer
  misc_feature (1)..(506): 3' terminal sequence from clone image:244810. fibrinogen, a alpha polypeptide(FGA) gene.
  misc_feature (364)..(364): n is a, c, g, or t
  misc_feature (407)..(407): n is a, c, g, or t
  misc_feature (474)..(474): n is a, c, g, or t
  misc_feature (479)..(479): n is a, c, g, or t
  misc_feature (495)..(495): n is a, c, g, or t
ttttttttttaaagataaaaaaaaccttacataactttatttttcaaagactaatatgtctcaggtacatttagctacagtacaaaggataagaaaatagcgcctaggaattttttaggttgtagagaatctcaactggctttaccttttgtattttctctccacttctctagcaaagaagacagagtgctcccattcccacttcttcagcctattgggtcacaaggggcctaattttcatgcgaacagccctgagggaataatctgcccctctaaaggaaacccagaccactccattctcaatctcataaggactgttattccttgggtcataggagcccccagggtagtagattccattggngattggctgcttggcagttattataccaccagcctcccccatngacttctggaaagttctcttcccaatggtctggatccctgtcaaaggtgctgaactggcatggttgnttgtnagaggtgtactctggncccttcctctt

SEQ ID NO: 454 - DNA, 3627 bp, Artificial Sequence
  Description of Artificial sequences:primer
  misc_feature (1)..(3627): fibrinogen, a alpha polypeptide(FGA) gene.
gtctaggagccagccccacccttagaaaagatgttttccatgaggatcgtctgcctagttctaagtgtggtgggcacagcatggactgcagatagtggtgaaggtgactttctagctgaaggaggaggcgtgcgtggcccaagggttgtggaaagacatcaatctgcctgcaaagattcagactggcccttctgctctgatgaagactggaactacaaatgcccttctggctgcaggatgaaagggttgattgatgaagtcaatcaagattttacaaacagaataaataagctcaaaaattcactatttgaatatcagaagaacaataaggattctcattcgttgaccactaatataatggaaattttgagaggcgatttttcctcagccaataaccgtgataatacctacaaccgagtgtcagaggatctgagaagcagaattgaagtcctgaagcgcaaagtcatagaaaaagtacagcatatccagcttctgcagaaaaatgttagagctcagttggttgatatgaaacgactggaggtggacattgatattaagatccgatcttgtcgagggtcatgcagtagggctttagctcgtgaagtagatctgaaggactatgaagatcagcagaagcaacttgaacaggtcattgccaaagacttacttccctctagagataggcaacacttaccactgataaaaatgaaaccagttccagacttggttcccggaaattttaagagccagcttcagaaggtacccccagagtggaaggcattaacagacatgccgcagatgagaatggagttagagagacctggtggaaatgagattactcgaggaggctccacctcttatggaaccggatcagagacggaaagccccaggaaccctagcagtgctggaagctggaactctgggagctctggacctggaagtactggaaaccgaaaccctgggagctctgggactggagggactgcaacctggaaacctgggagctctggacctggaagtactggaagctggaactctgggagctctggaactggaagtactggaaaccaaaaccctgggagccctagacctggtagtaccggaacctggaatcctggcagctctgaacgcggaagtgctgggcactggacctctgagagctctgtatctggtagtactggacaatggcactctgaatctggaagttttaggccagatagcccaggctctgggaacgcgaggcctaacaacccagactggggcacatttgaagaggtgtcaggaaatgtaagtccagggacaaggagagagtaccacacagaaaaactggtcacttctaaaggagataaagagctcaggactggtaaagagaaggtcacctctggtagcacaaccaccacgcgtcgttcatgctctaaaaccgttactaagactgttattggtcctgatggtcacaaagaagttaccaaagaagtggtgacctccgaagatggttctgactgtcccgaggcaatggatttaggcacattgtctggcataggtactctggatgggttccgccataggcaccctgatgaagctgccttcttcgacactgcctcaactggaaaaacattcccaggtttcttctcacctatgttaggagagtttgtcagtgagactgagtctaggggctcagaatctggcatcttcacaaatacaaaggaatccagttctcatcaccctgggatagctgaattcccttcccgtggtaaatcttcaagttacagcaaacaatttactagtagcacgagttacaacagaggagactccacatttgaaagcaagagctataaaatggcagatgaggccggaagtgaagccgatcatgaaggaacacatagcaccaagagaggccatgctaaatctcgccctgtcagagactgtgatgatgtcctccaaacacatccttcaggtacccaaagtggcattttcaatatcaagctaccgggatccagtaagattttttctgtttattgcgatcaagagaccagtttgggaggatggcttttgatccagcaaagaatggatggatcactgaattttaaccggacctggcaagactacaagagaggtttcggcagcctgaatgacgagggggaaggagaattctggctaggcaatgactacctccacttactaacccaaaggggctctgttcttagggttgaattagaggactgggctgggaatgaagcttatgcagaatatcacttccgggtaggctctgaggctgaaggctatgccctccaagtctcctcctatgaaggcactgcgggtgatgctctgattgagggttccgtagaggaaggggcagagtacacctctcacaacaacatgcagttcagcacctttgacagggatgcagaccagtgggaagagaactgtgcagaagtctatgggggaggctggtggtataataactgccaagcagccaatctcaatggaatctactaccctgggggctcctatgacccaaggaataacagtccttatgagattgagaatggagtggtctgggtttcctttagaggggcagattattccctcagggctgttcgcatgaaaattaggccccttgtgacccaataggctgaagaagtgggaatgggagcactctgtcttctttgctagagaagtggagagaaaatacaaaaggtaaagcagttgagattctctacaacctaaaaaattcctaggtgctattttcttatcctttgtactgtagctaaatgtacctgagacatattagtctttgaaaaataaagttatgtaaggttttttttatctttaaatagctctgtgggttttaacatttttgtaaagatataccaagggccattcagtacatcaggaaagtggcagacagaagcttctctctgcaaccttgaagactattggtttgagaacttctcttcccataccacccaaaatcataatgccattggaaagcaaaaagttgttttatccatttgatttgaattgttttaagccaatattttaaggtaaaactcactgaatctaaccatagctgacctttgtagtagaatttacaacttataattacaatgcacaatttataattacaatatgtatttatgtcttttgctatggagcaaatccaggaaggcaagagaaacattctttcctaaatataaatgaaaatctatcctttaaactcttccactagacgttgtaatgcacacttatttttttcccaaggagtaaccaatttctttctaaaacacatttaaaattttaaaactatttatgaatattaaaaaaagacataattcacacattaataaacaatctcccaagtattgatttaacttcatttttctaataatcataaactatattctgtgacatgctaattattattaaatgtaagtcgttagttcgaaagcctctcactaagtatgatctatgctatattcaaaattcaacccatttactttggtcaatatttgatctaagttgcatctttaatcctggtggtcttgccttctgatttttaatttgtatccttttctattaagatatatttgtcattttctcttgaatatgtattaaaatatcccaagc

SEQ ID NO: 455 - DNA, 472 bp, Artificial Sequence
  Description of Artificial sequences:primer
  misc_feature (1)..(472): 3' terminal sequence from clone image:245614. cathepsin s(CTSS) gene.
  misc_feature (403)..(403): n is a, c, g, or t
  misc_feature (424)..(424): n is a, c, g, or t
  misc_feature (459)..(459): n is a, c, g, or t
  misc_feature (468)..(468): n is a, c, g, or t
gaaatttgaaatggcagatttattaagtatttttaagccatcaagttacaaaaggctattaggggtcttaaaaagacaaagagtatacaataaaacaataagcaattacagattgttttaggttgaacaatttttgtacagttatatctatagtacattactaatttacttagcaaactttatcctgagatttgcaaatttaaaaaaatgaagaatcaaactatattttcttttctgtttttttgaaacagagtctccactctgtcatccaggctggagtacagtggtgtgatctcagctcaacatagcctcaacctcttgggttcaaggaatctcgtgcctcagcctcccaagtagctggggattacaggcatgcaccaccgtgctcggctaaattttttgnatttttagtagagatgggggnttcaccatgttagccaggctgctctttaaactccngggcctcangttg

SEQ ID NO: 456 - DNA, 372 bp, Artificial Sequence
  Description of Artificial sequences:primer
  misc_feature (1)..(372): 5' terminal sequence from clone image:245614. cathepsin s(CTSS) gene.
  misc_feature (252)..(252): n is a, c, g, or t
  misc_feature (263)..(263): n is a, c, g, or t
  misc_feature (305)..(305): n is a, c, g, or t
  misc_feature (321)..(321): n is a, c, g, or t
  misc_feature (355)..(355): n is a, c, g, or t
gacagaagtggtgtctactatgaaccatcctgtactcagaatgtgaatcatggtgtacttgtggttggctatggtgatcttaatgggaaagaatactggcttgtgaaaaacagctggggccacaactttggtgaagaaggatatattcggatggcaagaaataaaggaaatcattgtgggattgctagctttccctcttacccagaaatctagaggatctcccctttttataacaaatcaagaaatatggangcactttctcntaacttaattttttcctggctggaatccaggaagaattaatngtggcatgattaatgntgtatttactgtaccaattagaaaatatagtttngaggccgggcacggtgg

SEQ ID NO: 457 - DNA, 4100 bp, Artificial Sequence
  Description of Artificial sequences:primer
  misc_feature (1)..(4100): cathepsin s(CTSS) gene.
gtacctcatgtgacaagttccaatttcttttcaagtcaattgaactgaaatctccttgttgctttgaaatcttagaagagagcccactaattcaaggactcttactgtgggagcaactgctggttctatcacaatgaaacggctggtttgtgtgctcttggtgtgctcctctgcagtggcacagttgcataaagatcctaccctggatcaccactggcatctctggaagaaaacctatggcaaacaatacaaggaaaagaatgaagaagcagtacgacgtctcatctgggaaaagaatctaaagtttgtgatgcttcacaacctggagcattcaatgggaatgcactcatacgatctgggcatgaaccacctgggagacatgaccagtgaagaagtgatgtctttgatgagttccctgagagttcccagccagtggcagagaaatatcacatataagtcaaaccctaatcggatattgcctgattctgtggactggagagagaaagggtgtgttactgaagtgaaatatcaaggttcttgtggtgcttgctgggctttcagtgctgtgggggccctggaagcacagctgaagctgaaaacaggaaagctggtgtctctcagtgcccagaacctggtggattgctcaactgaaaaatatggaaacaaaggctgcaatggtggcttcatgacaacggctttccagtacatcattgataacaagggcatcgactcagacgcttcctatccctacaaagccatggatcagaaatgtcaatatgactcaaaatatcgtgctgccacatgttcaaagtacactgaacttccttatggcagagaagatgtcctgaaagaagctgtggccaataaaggcccagtgtctgttggtgtagatgcgcgtcatccttctttcttcctctacagaagtggtgtctactatgaaccatcctgtactcagaatgtgaatcatggtgtacttgtggttggctatggtgatcttaatgggaaagaatactggcttgtgaaaaacagctggggccacaactttggtgaagaaggatatattcggatggcaagaaataaaggaaatcattgtgggattgctagctttccctcttacccagaaatctagaggatctctcctttttataacaaatcaagaaatatgaagcactttctcttaacttaatttttcctgctgtatccagaagaaataattgtgtcatgattaatgtgtatttactgtactaattagaaaatatagtttgaggccgggcacggtggctcacgcctgtaatcccagtacttgggaggccaaggcaggcatatcaacttgaggccaggagttaaagagcagcctggctaacatggtgaaaccccatctctactaaaaatacaaaaaattagccgagcacggtggtgcatgcctgtaatcccagctacttgggaggctgaggcacgagattccttgaacccaagaggttgaggctatgttgagctgagatcacaccactgtactccagcctggatgacagagtggagactctgtttcaaaaaaacagaaaagaaaatatagtttgattcttcatttttttaaatttgcaaatctcaggataaagtttgctaagtaaattagtaatgtactatagatataactgtacaaaaattgttcaacctaaaacaatctgtaattgcttattgttttattgtatactctttgtctttttaagacccctaatagccttttgtaacttgatggcttaaaaatacttaataaatctgccatttcaaatttctatcattgccacataccattcttattcctaggcaactattaataatctatcctgagaatattaattgtggtattctggtgatggggtttagcaactttgatggaagaaaatattaggctataaatgtcctaaggactcagattgtatctttgtacagaagaggattcaaaacgccacgtgtagtggctcatgcctgtaatcccaacactttgggaggctgaagtaggaggatcgtcttgagcccaggagttcaagaccagcctggacaacatagtgagaccttgtctccacaaaaataaaaaagaaactatccaggagtggtggtgtgtgcctgtggtccctgctatgcagatgtctaagacaggaggatcacaagagcccaggaggttgagaatgcagtgagcttgtaattgcaccactgcactccagcctgggtgacagagcaagaccctgtcttaaaaaaagaggattcaacacatatttttatattatgttaaagtaaagaaatgcataaaagacaagcactttggaagaattattttaatgatcaacaatttaatgtattagtccaaattatttttacgtagtcatcaacaatttgaccagggcctttatttggcaaataactgagccaaccagaataaaataaccaatactccactgctcatatttttatctaattcagatggatcttccttacaactgctctagattagtagatgcatctaagcaggcagcaggaactttaaattttttaagttcatgtctatgacatgaacaatgtgtgggataatgtcattaatatatcctaaattaacctaaacgtatttcactaactctggctccttctccataaagcacattttaaggaacaagaattgctaaatataaaaacataaataataccataatacatggctatcatcaaaagtgtatagaatattatagtttaaaagtatttagttgattacttttcagttttgttttgttttttgagacggagtctcactctgttgcccaggctggagtgcagtggcaccatctcagttcactgcaacttctgcctcccgagttcaagcgattctcctgcctcagcctcccgagtagctggaattataggcgtgcaccaccacgcccagctaatttttgtatttttagtaaagacagggttttgccacattagccaggctggtctcaaactcctgacctcaggtgatccacccaccccagcctcccaaagtgctaagattacaggcgtgagccactgagcccagcctacttttcagtttttaacataatttttgttttatccacaacttttcaagtattgaaagtagaataaaaacatgggttcttagtctttagctatctgttaaagcctatgaatgccttcttaaaatcatgtttttaaatgcataaaatatataggattacaaaggaatctaattatatcgaaatacagttattaaaatgttaaaagataagtttgttatatattaatatgcatgcttctttataaatgcattaaataagagttaatagctatcctaaatttgaaatagtgataagcataatgaaaatagatgcaaaaaactaatgtgatatgaaaatatctgggtttttcttttgatgatgaagtattgctaatattaccgtggtttatgaactatgttcagaattgaagaaaatcctaactttcagttagaggttagtgacggggttcaggacaccctacacaaaatacagcactttgacatattgaatattttaagctgaaggcatttgaggaaattgcagaagcaggaaggtgactctgaccttctgcctgctgttctccccagaagcagccataaaacctgggaaggattttctgaccttcccctgaagtagatcataagactgtcatgtaagaggtgctctcctggcacccagagaaaaggagcatccttacctccaaaagcacagggacacaaagaggaatctaaacaaacaggcctctcagtttcccccagtttattacatttagcttgttcacactttgccctatgacatttctacatcactggctgctcttcatcaaacctactataaaaaacattcaagttcaactgtttctttgggcctttatttccttatggagcccctcgtgtcgtgtaaaacttatattaaataaatgtgcatgcttttctcttgctaatctctcttttgttatagagatctcagccctaaacctaggatggatagaaggaaacatatgttctcccctacattagtaaaaataaaaatggaattttttacccatacaaa

SEQ ID NO: 458 - DNA, 384 bp, Artificial Sequence
  Description of Artificial sequences:primer
  misc_feature (1)..(384): 3' terminal sequence from clone image:24609. family with sequence similarity 3, member a(FAM3A) gene.
  misc_feature (92)..(92): n is a, c, g, or t
  misc_feature (173)..(173): n is a, c, g, or t
  misc_feature (234)..(234): n is a, c, g, or t
  misc_feature (275)..(275): n is a, c, g, or t
  misc_feature (294)..(294): n is a, c, g, or t
  misc_feature (321)..(321): n is a, c, g, or t
  misc_feature (353)..(353): n is a, c, g, or t
  misc_feature (362)..(362): n is a, c, g, or t
tttttttttttttgaaggcatttcttctgtggggccatcactttattaaaggggtcatctagaaggtgggcccctgacaaaccgcgggactntgatcgggctccagctacttcaccaccccgggccagcctgctccaggggtcccttcctgctgagagcaggcgatgaggcangtcaggctcatgaagcagccaccgggtttggctcactggaaggaatcacactggaaacatntttagcccgcagtgcagagtggctccagaagggagaggttntggaagacgccccaacctnccgggctgctcccagagttgcacagtnaggggcaggcacccaggggccgttccaggganttcaagatnggggatgggagatggctttagg

SEQ ID NO: 459 - DNA, 419 bp, Artificial Sequence
  Description of Artificial sequences:primer
  misc_feature (1)..(419): 5' terminal sequence from clone image:24609. family with sequence similarity 3, member a(FAM3A) gene.
  misc_feature (400)..(400): n is a, c, g, or t
agcaggagaagtggacatgaggttggcaggcctctccgcattgtggtcctagtcgtcagtgtgggtgtacatggatcgtggtcagcatcctcctgggtgggcctggcagtggctttcctcgcatccagcaactcttcaccagtccagagagctcggtgactgcagcgccacgggccaggaagtacaagtgtggcctgccccagccgtgtcctgaggagcacctggccttccgcgtggtcagcggggccgccaacgtcattgggcccaagatcttgcctcgaggacaagatgctgatgagcagcgtcaaggacaacgtggggccgcgggttgaacattcgccctgggtgaacggggttcagcggcgagttcattcgagggcccgggctttttgacattttngggccggagatgttcaacg

SEQ ID NO: 460 - DNA, 1606 bp, Artificial Sequence
  Description of Artificial sequences:primer
  misc_feature (1)..(1606): family with sequence similarity 3, member a(FAM3A) gene.
aaccacatcttcgtcccagccccggaggctcctgtgggcaagatcgtgagccaacgggttcctgaggcccctcctggccaggcagggtttccccgcgcgtttccgaggagccctgcctggccgggcggctggacaaacaggtcgtagcaccgatcgcgcccgcccccagcaggggtcccgcacaggcttgcccctgacccccacccaaacctgtccttccgctttgcccccaaacagtgcacttgccggcggtcccaacccagcaggagaagtggacatgaggttggcaggccctctccgcattgtggtcctagtcgtcagtgtgggtgtcacatggatcgtggtcagcatcctcctgggtgggcctggcagtggctttcctcgcatccagcaactcttcaccagtccagagagctcggtgactgcagcgccacgggccaggaagtacaagtgtggcctgccccagccgtgtcctgaggagcacctggccttccgcgtggtcagcggggccgccaacgtcattgggcccaagatctgcctcgaggacaagatgctgatgagcagcgtcaaggacaacgtgggccgcgggctgaacatcgccctggtgaacggggtcagcggcgagctcatcgaggcccgggcctttgacatgtgggccggagatgtcaacgacctgttgaagtttattcggccactgcacgaaggcaccctggtgttcgtggcatcctacgacgacccagccaccaagatgaatgaagagaccagaaagctcttcagtgagctgggcagcaggaacgccaaggagctggccttccgggacagctgggtgtttgtcggggccaagggtgtgcagaacaagagcccctttgagcagcacgtgaagaacagtaagcacagcaacaagtacgaaggctgccccgaggcgctggagatggaaggctgtatcccgcggagaagcacggccagctagcacggccagtgccaggaccgggccgagggaggccagaccaagggaggcacgcgcgctgccgggcggacagaggctgaggctcacaccccacacccgggcaggagcgctccctggccccaacacatcggggctccgaggcagtgaccagaacgtggtctcaaggtggtgggggctatgggggctgcagggggtagccctgccgcactttgtcacgggagcccagggtacccgcctccttttcgtaacactgttccccccggtcagcccatctagccctgtcctccattcctcacgccatctccatccccatcttgagtcctggaacggccctgggtgcctgcccctcactgtgcatctctgggagcagcccggcaggttggggcgtcttccagaacctctcccttctggagccactctgcactgcgggctaaacatgtttccagtgtgattccttccagtgagccaaacccggtggctgcttcatgagcctgactgcctctcgcctgctctcagcaggaagggacccctggagcaggctggcccggggtggtgaagtagctggagcccgatcacagtcccgcggtttgtcagggggcccaccttctagatgaccccttaataaagtgatggccccac

SEQ ID NO: 461 - DNA, 418 bp, Artificial Sequence
  Description of Artificial sequences:primer
  misc_feature (1)..(418): 3' terminal sequence from clone image:246170. gelsolin (amyloidosis, finnish type)(GSN) gene.
  misc_feature (237)..(237): n is a, c, g, or t
  misc_feature (403)..(403): n is a, c, g, or t
tcacacttcaaaatgtttttattggatttaatttcccaaacactgacattttagacaattttgcaaggactctgaatttttgcagggctatttttggatactgtaaaaaaaaaaaaaagaaacaacacacacacacacacacactcatagcagagtgctctgctcgctctaaggcctctttgagggaaggacagttccaaaaggcactgaccggtgacatgggtgggccctgccctncctcaggcagccagctcagccatggccctgtccaaggggtccacagaccaggtaatcatcatcccagccaaggaaccagcccacaaaggagggaggctcaaagccttgcttcaccacggtgatgggcgtccgcgattcccgattggctgggtccgtctcgatgtanccgcttagcagaagg

SEQ ID NO: 462 - DNA, 482 bp, Artificial Sequence
  Description of Artificial sequences:primer
  misc_feature (1)..(482): 5' terminal sequence from clone image:246170. gelsolin (amyloidosis, finnish type)(GSN) gene.
  misc_feature (125)..(125): n is a, c, g, or t
  misc_feature (127)..(127): n is a, c, g, or t
  misc_feature (159)..(159): n is a, c, g, or t
  misc_feature (399)..(399): n is a, c, g, or t
gctgagggcggtgagacccactgttcaagcagttcttcaagaactggcgggacccagaccagacagatggcctgggcttgtcctacctttccagccatatcgccaacgtggagcgggtgcccttngncgccgccaccctgcacacctccactgccatgnccgcccagcacggcatggatgacgatggcacaggccagaaacagatctggagaatcgaaggttccaacaaggtgcccgtggaccctgccacatatggacagttctatggaggcgacactacatcattctgtacaactaccgccatggtggccgccagggaagataatctataactggcagggtgcccagtctacccaggatgaaggtcgctgcatctggccatcctgactggctcagctnggatgaaggatctgggaaggtacccctgtccagagccgtgttggtccaaggcaaggagcccgcccacctcatgagcctgtttg

SEQ ID NO: 463 - DNA, 4750 bp, Artificial Sequence
  Description of Artificial sequences:primer
  misc_feature (1)..(4750): gelsolin (amyloidosis, finnish type)(GSN) gene.
gtttagtatttttgagaacccagccacctggccatgctgtaccagccttgtgctgagtgctggggataaaggaacaaataaaacccagtccaggcttctgtgtgcccagccctgtgccgggtcccagtgggtaacagcatgtccaatcccctcagtgtcccactagaggcttcctttggggctgctggggacatcttgtttctagttgagaattcagatttatgtccaaagacaagaactccctgaggggcagattacaacatggactgggccattacaatcaacaaggacacaaagctaacacagccatcgttatacaccagacatgtgctaaggacttgatttccccattgtttaatcatcaccaactccattatcacccccatttcacagatgtggaaactgaggctgagaagagtaagggacttgtccaagggcacagagcaagtcagggctacggtgatgtttcaggcccagacctgtttgcctctggagcccagggtttaacacaccccagtgctgctgtgaaagggctctggacagctcaggctggccggccaatgcggggataaccgaacagaggtatggaacagaaaggggcgttgaggatgttgctgtgtgtgtgcggtggggggagtgacaaggcttcagcaatggtactcattctctccaaccagctcccagtgctgctgtcctctgatccaccctccgctctgcctgccatggactaattgttctgaaatcccatggatcaagtcactcctcagctgaggacctgtccatggctccctggtacccagaggatagaaacccagcattcaaaacctctctaaccagctccccacctcaaccctcacactcctgctcactagcccccaggcgcagtgggctcttccagcggccaagcctgtgcctacggtgccttcttgcctggaatgcccaactcccccttctcagccttctttgactctcaagtaggaaaagcactctttgtctccctgagccccttggcacttatcacagagcactctgggcgttaacttccactgtctccgtcttggattagagtggatctcagagggcccggtggtgtctgcttcacctccctctccactgcagcagcttagcaaggactggccgggtaaactaaaaaatgcaaagagctgagagaatcctgggaaagtgcacatttcccaggactgcccaatgacaagccccgtaccaaggcacagcatcaggataccctgatgtggaagaaccaaaaattgcaccctcatggcttatcaggatggtccttgtgtctgtccctttcaagggttctgataatgaaatctgggcaagtcaccctcctgctttaaaacttccaatggttcccagaggtctagcataaaatccaaactcaagggcccacataacctaggtgctgcctggcccccaggccctcctcttgccacgcccccctccctggccagcctccctcacttctttcagttcctcaaggactccccctcactaaagccttacccaggtcgcctctctgcctagggggctcctccattccctgctcactcagccacctccctctccctcttcaggtctcactttttaggggaggcttccctgatctgtccagataagacctcaccactcccacccaatcccaaacgctcccataacctgatcgtttccttcacagcaagaattaatcttcagtgtaaataatgatctactgaagacctatgaggaatgggaaagtcttgttttttgctgattcttcaacacccagctcagagcctaaatatctctcaaatgaatgaatatatgaatgaatgagtgaatgaacctatatacataaatcaagacaagaaggtgggcagaatcctagggaacactgaggcaggaaaagcagggccctgggccaggcgtcatggctcacacctgtaatcccagcactttgggaggccaaggcaggcagatcacttgaggtcaggactttgagaccagcctggccaacatggtaaaaccctgtctctactaaaaacacaaacattagccgggtatggtggcacatgcctgtagtcccagctactcaagaggctgaggcaggagaatcacttgtacctgggaggaggaggttgcagtgagctgagatcgtgccactgcactccagcctgggcaccacagcaagactccgtctaaaaaaaaaaaagaaaaagaaagaaagaaagaaaaagaaaaccagggccctaactaaaaaagacaggaggaaaaacagggccctaactaaaaagagaggaggggccctaactgaaaaaaccagggccctaactaaaaaagtcaggaggaaaaacagggccctaactaaaaagagaagaggaaataaaccagacagtgcagcctcccagaagcaaaaggagggagtttctggaactgcactagagactggcacatggagtcctgaggaaagagcactggattggacatcgaggaggtcactggggcctccctgattgaaccaaggttccgtggaggtgggcacagggctggtacattgcagggggcagaggagtaaagagggatgaataagcaaagctctcaggcgacggttgctcagctgggtctatgccagcctggccctgcagggtctgcggaagacagggcccctgtgtcatagtcaccaaaagcatcaacagagcataacattctttttgttgacagattacattgaggcaacttggcttttggagttatcagggctcagtctcaaaggcagatgcatcagagccaagacccggccctcaagtcctcctattagggcagcactagggctacctctttgtcagcagaacctttggatagccgctgatggggtgagtcagctttctgggcccggcagaccttttgggaatccctggcttttggggcacaacatcctggggaccaccaaaaagccctttcacctgagctttgggaaagaggaacagctccggctgtgggtggctcatgtcaccatctggaagccagctgggccacagcagacgcgtaagtcctgtattcattcatccccttctccttttggcagaaaagggatggcgtgggttggaggggtgttttcctgggttcttgcacaattgctcattagaaattcacttctgtttgggtgttggaagctgggcgattccccctagtagtgatccttcctgtctcactggtcacaaagccctttggcatctacaagctcgttgggtccacacagcagctttgttaggtgggtagggggagaccaaggcacccatcctacaggtggagaaaccgaggctgaagctgggaggtgagccagtctcctggcttccagcccaggactctgcactcctccccccacctccccacctacttcagcaggtcacctgtgaatctgatagtcaggtgggccccaccctgccagctggccccagcgggcatgactcatccgcttccccatgactcacacacctcaggtgctcctcctctggtcaacaagtccagagacttggcaaatggacccccatttttctcacctctccaaagcctctgggaagaattcctgcacctcctctttatggggactctgctcttctacagaatagcaaccaaggccttgagagggaaagcaactctcctaaagtcacatagcaagcaaccagcacagccagggtgggagccaggcatccgggcaccgagcccagtcccggcctcctccctacaagatcactctcgcctgacctccctctcaaggacaggaaaggagcagagacgcactctgagccttattaggaagacctcagggactcccactgaatccactgtggctacagcggctgcttccaccactgaagtcccctccaggcttccctgggcagccagggcggggtttaagaggacgacaggtgtctgtattgctctacctacctaacaaggctgtgcagggtgaagagtgctgctccgtgggaaggcgctgggaccaaggccgaagcactggacaaagagagctatgagcactacctgtaaacaaagggcacagaatgtcagcctcagggggagttcaaggtcatctggtcaaatccccatttgatgtttcaacccctttcctcccctccaccaggggtcacacaatcagtacttgcacacatccagcaacaccgcactcactacctgccaaggctgcaagacctgctgctggagggtttggctgcgtaaaagaattgtcctaaggatgcactaaaatctctctcttcttatgccttgtacctgctggtattagctctgcctccttttgggtcagccagaacaggtctgtccccctctttcctgatggctctttagagatttgaagacagtgatcctgggcccctcaagtcttctacaaattgtgcaccccctttcctccagctcttcctgagaccagggtttccggttcgctcaccctgttccctgatctgctccagatgaaacctgtccctactgacagcacaagacccagaattagacaatcagtcaagctctatccaggacagggcaagcaggactctcacctccttcattagagatatcatgcttctattaattgagcctaaaatcccatttgcatttaaggcagccctattgcatggctgaattcagtttacagtcaacttcagagctgtacgttagtactctgaagttatataaactgggccctcacttaactgtgtaacttgagcaagcaaaaaaa

SEQ ID NO: 464 - DNA, 454 bp, Artificial Sequence
  Description of Artificial sequences:primer
  misc_feature (1)..(454): 3' terminal sequence from clone image:246290. insulin-degrading enzyme(IDE) gene.
  misc_feature (302)..(302): n is a, c, g, or t
gtttctctaatagtgaatcagaaactattaaagtggccaagatgattttcttaggctctggaagactcaggaatgcatccacttgcactttcccatgcatggggaatcttcagagttttgcagccatgaagttaatatcgtggtttcacaaggggaaacagtggcagaccacgcttgaattcggtcatgttctgaatcacttcaggttgtggcaaggctggtgcttgtgacaaatttatgtcattttgacatgggaactctccaacaacaggacaagaatccatttccctggcaagaacatnggacggataccttatgtctccttggagcatctactgccaacatttccttgtagaatttgatgatatcttccttggtaagtgtctttaaatatgcaacctcagtgttatctctgtcaaaattatattgctgggagatgatttctccccagtat

SEQ ID NO: 465 - DNA, 3279 bp, Artificial Sequence
  Description of Artificial sequences:primer
  misc_feature (1)..(3279): insulin-degrading enzyme(IDE) gene.
ccggctcgaagcgcaacgaggaagcgtttgcggtgatcccggcgactgcgctggctaatgcggtaccggctagcgtggcttctgcaccccgcactgcccagcaccttccgctcagtcctcggcgcccgcctgccgcctccggagcgcctgtgtggtttccaaaaaaagacttacagcaaaatgaataatccagccatcaagagaataggaaatcacattaccaagtctcctgaagacaagcgagaatatcgagggctagagctggccaatggtatcaaagtacttcttatgagtgatcccaccacggataagtcatcagcagcacttgatgtgcacataggttcattgtcggatcctccaaatattgctggcttaagtcatttttgtgaacatatgctttttttgggaacaaagaaataccctaaagaaaatgaatacagccagtttctcagtgagcatgcaggaagttcaaatgcctttactagtggagagcataccaattactattttgatgtttctcatgaacacctagaaggtgccctagacaggtttgcacagttttttctgtgccccttgttcgatgaaagttgcaaagacagagaggtgaatgcagttgattcagaacatgagaagaatgtgatgaatgatgcctggagactctttcaattggaaaaagctacagggaatcctaaacaccccttcagtaaatttgggacaggtaacaaatatactctggagactagaccaaaccaagaaggcattgatgtaagacaagagctactgaaattccattctgcttactattcatccaacttaatggctgtttgtgttttaggtcgagaatctttagatgacttgactaatctggtggtaaagttattttctgaagtagagaacaaaaatgttccattgccagaatttcctgaacaccctttccaagaagaacatcttaaacaactttacaaaatagtacccattaaagatattaggaatctctatgtgacatttcccatacctgaccttcagaaatactacaaatcaaatcctggtcattatcttggtcatctcattgggcatgaaggtcctggaagtctgttatcagaacttaagtcaaagggctgggttaatactcttgttggtgggcagaaggaaggagcccgaggttttatgttttttatcattaatgtggacttgaccgaggaaggattattacatgttgaagatataattttgcacatgtttcaatacattcagaagttacgtgcagaaggacctcaagaatgggttttccaagagtgcaaggacttgaatgctgttgcttttaggtttaaagacaaagagaggccacggggctatacatctaagattgcaggaatattgcattattatcccctagaagaggtgctcacagcggaatatttactggaagaatttagacctgacttaatagagatggttctcgataaactcagaccagaaaatgtccgggttgccatagtttctaaatcttttgaaggaaaaactgatcgcacagaagagtggtatggaacccagtacaaacaagaagctataccggatgaagtcatcaagaaatggcaaaatgctgacctgaatgggaaatttaaacttcctacaaagaatgaatttattcctacgaattttgagattttaccgttagaaaaagaggcgacaccataccctgctcttattaaggatacagtcatgagcaaactttggttcaaacaagatgataagaaaaaaaagccgaaggcttgtctcaactttgaatttttcagcccatttgcttatgtggaccccttgcactgtaacatggcctatttgtaccttgagctcctcaaagactcactcaacgagtatgcatatgcagcagagctagcaggcttgagctatgatctccaaaataccatctatgggatgtatctttcagtgaaaggttacaatgacaagcagccaattttactaaagaagattattgagaaaatggctacctttgagattgatgaaaaaagatttgaaattatcaaagaagcatatatgcgatctcttaacaatttccgggctgaacagcctcaccagcatgccatgtactacctccgcttgctgatgactgaagtggcctggactaaagatgagttaaaagaagctctggatgatgtaacccttcctcgccttaaggccttcatacctcagctcctgtcacggctgcacattgaagcccttctccatggaaacataacaaagcaggctgcattaggaattatgcagatggttgaagacaccctcattgaacatgctcataccaaacctctccttccaagtcagctggttcggtatagagaagttcagctccctgacagaggatggtttgtttatcagcagagaaatgaagttcacaataactgtggcatcgagatatactaccaaacagacatgcaaagcacctcagagaatatgtttctggagctcttctgtcagattatctcggaaccttgcttcaacaccctgcgcaccaaggagcagttgggctatatcgtcttcagcgggccacgtcgagctaatggcatacagagcttgagattcatcatccagtcagaaaagccacctcactacctagaaagcagagtggaagctttcttaattaccatggaaaagtccatagaggacatgacagaagaggccttccaaaaacacattcaggcattagcaattcgtcgactagacaaaccaaagaagctatctgctgagtgtgctaaatactggggagaaatcatctcccagcaatataattttgacagagataacactgaggttgcatatttaaagacacttaccaaggaagatatcatcaaattctacaaggaaatgttggcagtagatgctccaaggagacataaggtatccgtccatgttcttgccagggaaatggattcttgtcctgttgttggagagttcccatgtcaaaatgacataaatttgtcacaagcaccagccttgccacaacctgaagtgattcagaacatgaccgaattcaagcgtggtctgccactgtttccccttgtgaaaccacatattaacttcatggctgcaaaactctgaagattccccatgcatgggaaagtgcaagtggatgcattcctgagtcttccagagcctaagaaaatcatcttggccactttaatagtttctgattcactattagagaaacaaacaaaaaattgtcaaatgtcattatgtagaaatattataaatccaaagtaa

SEQ ID NO: 466 - DNA, 526 bp, Artificial Sequence
  Description of Artificial sequences:primer
  misc_feature (1)..(526): 3' terminal sequence from clone image:246860. alcohol dehydrogenase 4 (class ii), pi polypeptide(ADH4) gene.
  misc_feature (472)..(472): n is a, c, g, or t
  misc_feature (522)..(522): n is a, c, g, or t
tttttatggccaatctagttttatttattatctcttcattccccactttcaacttcccagaactaattttaaacaatttctaaagatgatatgattctattcataaacactagttattattattatttaacatagggaatattcatatatataacaggtacaaagtctataatatttaaagctcttttatgttcccatattaaatgtaaatatttgtttaaacgcatggctttccttggttcatcaaatcaggtaataaattaaccaggcaggttcacattcaatcagatagtattccgaattgctcctgggcatcttcaaaagatgaggattgttcggatgccttttccttgggttcattaggtcaaatgcctcactggattttgtcaaaaggcagggtatggggtcaccagtggcatccagattgaatttcctattcctatagtcagtgaccagctttgggatagaatcnacacttttccaaccaccaaagaatgttccatttatagtacggccgattantagc

SEQ ID NO: 467 - DNA, 420 bp, Artificial Sequence
  Description of Artificial sequences:primer
  misc_feature (1)..(420): 5' terminal sequence from clone image:246860. alcohol dehydrogenase 4 (class ii), pi polypeptide(ADH4) gene.
  misc_feature (343)..(343): n is a, c, g, or t
  misc_feature (349)..(349): n is a, c, g, or t
  misc_feature (371)..(371): n is a, c, g, or t
  misc_feature (391)..(391): n is a, c, g, or t
  misc_feature (403)..(403): n is a, c, g, or t
  misc_feature (413)..(413): n is a, c, g, or t
attctctcagtacactgtggtgtcagatatcaatcttgccaaaatagatgatgatgcaaatttagagagagtttgtctgcttggatgtgggttttcaactggctatggggctgcaatcaacaatgccaaggtcacccctggttcgacttgtgctgtctttggcctaggaggtgtgggtctttctgctgtaatgggttgtaaagcagcaggagcttccagaatcataggtattgacatcaacagtgagaagtttgtgaaggctaaagccctgggagccactgactgcctcaatcctaggagactttaccattaaacctatcccaggggaaggttatccattggnattggncccaagggggagggtgtggganttttggccccttggactggngccagggtgggntcttggaaanccatggt

SEQ ID NO: 468 - DNA, 2576 bp, Artificial Sequence
  Description of Artificial sequences:primer
  misc_feature (1)..(2576): alcohol dehydrogenase 4 (class ii), pi polypeptide(ADH4) gene.
aaagcttgctagattaactattgatacacaagcttaaataggtagtaaaccactaaatatgcaaggaagtgattatcagggttgtgaaggagaagaacaggtaagttaaatgggcattctgaggagtagaaatttcctttacttcataattatttgttaattcatctttatatgtttaatgggcttttctctattattttatatttttcaataaaagaaaaaagaatttaaaaaatcttggagctcactgggagcaatggggttgcagctgaagtccaatagtacaaatgatgtggtaagaggccggcagggctgtgaattacagcaacaaaggagaaaaggaagtgattggagaattaagcaacatgaatggtattattcaaagacagctcattataggacacggaactccctgggtaggagtttgaagctttcttaactcagaaagaaacttccaacacagtttcccaaagaaaaatgggcaccaagggcaaagttattaaatgcaaagcagccatcgcctgggaagcaggcaagcccctttgcattgaagaggttgaagtagctccccccaaggctcatgaagttcgcattcagatcattgctacctccctgtgccatactgatgccagtgttatcgattctaaatttgagggcctagctttcccagtgatcgttggccatgaggctgcaggtattgtggaaagtattgggccaggagtgaccaacgtcaaaccaggtgacaaagtaattccactttatgcacctctatgtagaaaatgcaagttttgtctgagtccactcacaaatttgtgtgggaaaatcagtaatctcaaaagtcctgctagtgatcaacaactaatggaagacaaaaccagcaggtttacctgcaaaggaaaaccagtttaccatttctttggaaccagtacattctctcagtacactgtggtgtcagatatcaatcttgccaaaatagatgatgatgcaaatttagagagagtttgtctgcttggatgtgggttttcaactggctatggggctgcaatcaacaatgccaaggtcacccctggttcgacttgtgctgtctttggcctaggaggtgtgggtctttctgctgtaatgggttgtaaagcagcaggagcttccagaatcataggtattgacatcaacagtgagaagtttgtgaaggctaaagccctgggagccactgactgcctcaatcctagagacttacataaaccgatccaggaagttatcattgaattgaccaagggaggtgtggattttgcccttgactgtgcaggtggatctgaaaccatgaaagcagccctggactgtacaaccgcaggctggggatcatgtactttcattggagtagctgctggtagcaaaggattgactatttttccagaggagctaataatcggccgtactataaatggaacattctttggtggttggaaaagtgtagattctatcccaaagctggtcactgactataagaataagaaattcaatctggatgcattggtgacccataccctgccttttgacaaaatcagtgaggcatttgacctaatgaaccaaggaaaaagcgtccgaacaatcctcatctttggaagatgccaggagcaattcagaatactatctgattgaatgtgaacctgcctggttaatttattacctgatttgatgaaccaaggaaagccatgagtttaaacaaatatttacatttaatatgggaacataaaagagctttaaatattatagactttgtacctgttatatatatgaatattccctatgttaaataataataataactagtgtttatgaatagaatcatatcatctttagaaattgtttaaaattagttctgggaagttgaaagtggggaatgaagagataataaataaaactagattggccatatgtttataatttttttagattgggtaatgaatacatggagtttcattatacttttctctccacgttttgtctatgttgaaaattttctgggagctaaatgatgagaacacatggacacatgatggggaacaacacacactggggcctgttgagggcagggagtcggcagagagagagcatcaggaagaatagctaatggatgctgggcttcatacctgggtgatgagatgatctgtgcagcaaagcaccatggtacatgtttacctatgtaacaaacctgcacatcctgcacatgtaccctggaacttaataaaagttggaaatttttaaaaagaatgaataagacctggtatttgatagcacaacagggagactatagtcaacagcaatttaattgtatattttaatatgactaaaagagtataatggattgtttgtaacacaaataaatgcttgaggagatggagaccccatattacatgatgtgattattacacattgcatgcctatatcaaaacatctcatgtaccccatccctatatacacctaatacccacaaaacttaaaatataaatgttttaaataaaaataaagaaaagatttccacaataaaaagatttttactggaaaaaatcacattattt

SEQ ID NO: 469 - DNA, 284 bp, Artificial Sequence
  Description of Artificial sequences:primer
  misc_feature (1)..(284): 3' terminal sequence from clone image:247055. desmocollin 2(DSC2) gene.
  misc_feature (152)..(152): n is a, c, g, or t
  misc_feature (161)..(162): n is a, c, g, or t
  misc_feature (199)..(199): n is a, c, g, or t
  misc_feature (207)..(207): n is a, c, g, or t
  misc_feature (211)..(211): n is a, c, g, or t
  misc_feature (220)..(220): n is a, c, g, or t
  misc_feature (222)..(222): n is a, c, g, or t
  misc_feature (230)..(232): n is a, c, g, or t
  misc_feature (244)..(244): n is a, c, g, or t
  misc_feature (247)..(247): n is a, c, g, or t
  misc_feature (267)..(267): n is a, c, g, or t
  misc_feature (276)..(276): n is a, c, g, or t
  misc_feature (280)..(280): n is a, c, g, or t
cggttctcagtgttggaaagtaatatggtaaaacttctcttctccgaggacaatagaatagtatttgttgtatagactgaaccatcctccaaaatttggaagtcaggatcacttgaatgaattagatttgcagctgtaaagcactctttcanggtaactcnnccaacaagtttctcgggatctagtttggagggaacangtaatgtnacanatttgcagngntcactggnnnatattaagatcncgngggtcagcaggagcagccgncagagggcnccgntcca

SEQ ID NO: 470 - DNA, 282 bp, Artificial Sequence
  Description of Artificial sequences:primer
  misc_feature (1)..(282): 5' terminal sequence from clone image:247055. desmocollin 2(DSC2) gene.
  misc_feature (54)..(54): n is a, c, g, or t
  misc_feature (71)..(71): n is a, c, g, or t
  misc_feature (87)..(87): n is a, c, g, or t
  misc_feature (192)..(192): n is a, c, g, or t
  misc_feature (271)..(271): n is a, c, g, or t
acccgtggctttcttagagaaatgaagtcttaagtcttaaatagacaacaaggnggggccgatcggtgtcntttggacgcgtctggngcccctccctccgccaaaggaaaagccccttggatgagaggcaggcgcttcagagaagctaagaaaagcacctctccgcgcgccccacctcctccgcctcgcgcncctcctgagcagcgggcccagactgcgctccggccgcggccctcgcccccgcggagccctcctaccccgggcccgacgnttcggcccgcg

SEQ ID NO: 471 - DNA, 3500 bp, Artificial Sequence
  Description of Artificial sequences:primer
  misc_feature (1)..(3500): desmocollin 2(DSC2) gene.
cgccaaaggaaaagccccttggatgagaggcaggcgcttcagagaagctaagaaaagcacctctccgcgcgccccacctcctccgcctcgcgctcctcctgagcagcgggcccagactgcgctccggccgcggccctcgccccgcggagccctcctaccccggcccgacgctcggcccgcgacctgccccgagccctctccatggaggcagcccgcccctccggctcctggaacggagccctctgccggctgctcctgctgaccctcgcgatcttaatatttgccagtgatgcctgcaaaaatgtgacattacatgttccctccaaactagatgccgagaaacttgttggtagagttaacctgaaagagtgctttacagctgcaaatctaattcattcaagtgatcctgacttccaaattttggaggatggttcagtctatacaacaaatactattctattgtcctcggagaagagaagttttaccatattactttccaacactgagaaccaagaaaagaagaaaatatttgtctttttggagcatcaaacaaaggtcctaaagaaaagacatactaaagaaaaagttctaaggcgcgccaagagaagatgggctccaattccttgttcgatgctagaaaactccttgggtccttttccacttttccttcaacaggttcaatctgacacggcccaaaactataccatatactattccataagaggtcctggagttgaccaagaacctcggaatttattttatgtggagagagacactggaaacttgtattgtactcgtcctgtagatcgtgagcagtatgaatcttttgagataattgcctttgcaacaactccagatgggtatactccagaacttccactgcccctaataatcaaaatagaggatgaaaatgataactacccaatttttacagaagaaacttatacttttacaatttttgaaaattgcagagtgggcactactgtgggacaagtgtgtgctactgacaaagatgagcctgacacgatgcacacacgcctgaagtactccatcattgggcaggtgccaccatcacccaccctattttctatgcatccaactacaggcgtgatcaccacaacatcatctcagctagacagagagttaattgacaagtaccagttgaaaataaaagtacaagacatggatggtcagtattttggtctacagacaacttcaacttgtatcattaacattgatgatgtaaatgaccacttgccaacatttactcgtacttcttatgtgacatcagtggaagaaaatacagttgatgtggaaatcttacgagttactgttgaggataaggacttagtgaatactgctaactggagagctaattataccattttaaagggcaatgaaaatggcaattttaaaattgtaacagatgccaaaaccaatgaaggagttctttgtgtagttaagcctttgaattatgaagaaaagcaacagatgatcttgcaaattggtgtagttaatgaagctccattttccagagaggctagtccaagatcagccatgagcacagcaacagttactgttaatgtagaagatcaggatgagggccctgagtgtaaccctccaatacagactgttcgcatgaaagaaaatgcagaagtgggaacaacaagcaatggatataaagcatatgacccagaaacaagaagtagcagtggcataaggtataagaaattaactgatccaacagggtgggtcaccattgatgaaaatacaggatcaatcaaagttttcagaagcctggatagagaggcagagaccatcaaaaatggcatatataatattacagtccttgcatcagaccaaggagggagaacatgtacggggacactgggcattatacttcaagacgtgaatgataacagcccattcatacctaaaaagacagtgatcatctgcaaacccaccatgtcatctgcggagattgttgcggttgatcctgatgagcctatccatggcccaccctttgactttagtctggagagttctacttcagaagtacagagaatgtggagactgaaagcaattaatgatacagcagcacgtctttcctatcagaatgatcctccatttggctcatatgtagtacctataacagtgagagatagacttggcatgtctagtgtcacttcattggatgttacactgtgtgactgcattaccgaaaatgactgcacacatcgtgtagatccaaggattggcggtggaggagtacaacttggaaagtgggccatccttgcaatattgttgggcatagcattgctcttttgcatcctgtttacgctggtctgtggggcttctgggacgtctaaacaaccaaaagtaattcctgatgatttagcccagcagaacctaattgtatcaaacacagaagctcctggagatgacaaagtgtattctgcgaatggcttcacaacccaaactgtgggcgcttctgctcagggagtttgtggcaccgtgggatcaggaatcaaaaacggaggtcaggagaccatcgaaatggtgaaaggaggacaccagacctcggaatcctgccggggggctggccaccatcacaccctggactcctgcaggggaggacacacggaggtggacaactgcagatacacttactcggagtggcacagttttactcagccccgtcttggtgaagaatccattagaggacacactctgattaaaaattaaacaatgaaagaaagtgtatctgtgtaatcaagatgaaaatcacaagcatgcccaagactatgtcctgacatataactatgaaggaagaggatcggtggctgggtctgtaggttgttgcagtgaacgacaagaagaagatgggcttgaatttttggataatttggagcccaaatttaggacactagcagaagcatgcatgaagagatgagtgtgttctaataagtctctgaaagccagtggctttatgacttttaaaaaaaattacaaaccaagaattttttaaagcagaagatgctatttgtgggggtttttctctcattatttggatggaatctctttggtcaaatgcacatttacagagagacactataaacaagtacacaaatttttcaatttttacatatttttaaattacttatcttctatccaaggaggtctacagagaaattaaagtctgccttatttgttacatttgggtataatgacaacagccaatttatagtgcaataaaatgtaattaattcaagtccttattatagactatttgaagcacaacctaatggaaaattgtagagaccttgctttaacattatctccagttaattaagtgttcatgtggtgcttggaaactgttgttttcctgaacatctaaagtgtgtagactgcattcttgctattattttattcttgtaatgtgaccttttcactgtgcaaagggagatttctagccaggcattgactattacaatttcatt

SEQ ID NO: 472 - DNA, 356 bp, Artificial Sequence
  Description of Artificial sequences:primer
  misc_feature (1)..(356): 3' terminal sequence from clone image:247905. tubulin, alpha, ubiquitous(K-ALPHA-1) gene.
  misc_feature (312)..(312): n is a, c, g, or t
  misc_feature (318)..(318): n is a, c, g, or t
  misc_feature (331)..(331): n is a, c, g, or t
  misc_feature (342)..(342): n is a, c, g, or t
ttttttttttttttgatgttaatgactttactttgagatatgatggaaaaatattacaggtacacatggaaaagacatgatcaccaagtgaaaacaatctaaccagaaagctttaacatctgtcagttaagctgaagctgaaattctgggagcatgacatgctgcagggccaaaaggaatggataattagtattcctctccttcttcctcaccctctccttcaacagaatccacaccaacctcctcataatccttctcaagggcagccatatcttcacgggcctctgaaaactcggcttcctccatcccctnacccanggtaccaggtggnacaaagggcangcttgggatacatt

SEQ ID NO: 473 - DNA, 1596 bp, Artificial Sequence
  Description of Artificial sequences:primer
  misc_feature (1)..(1596): tubulin, alpha, ubiquitous(K-ALPHA-1) gene.
tgtcggggacggtaaccgggacccgtgctctgctcctgtcgccttcgcctcctgaatccctagccatatgcgtgagtgcatctccatccacgttggccaggctggtgtccagattggcaatgcctgctgggagctctactgcctggaacacggcatccagcccgatggccagatgccaagtgacaagaccattgggggaggagatgactccttcaacaccttcttcagtgagacgggcgctggcaagcacgtgccccgggctgtgtttgtagacttggaacccacagtcattgatgaagttcgcactggcacctaccgccagctcttccaccctgagcagctcatcacaggcaaggaagatgctgccaataactatgcccgagggcactacaccattggcaaggagatcattgaccttgtgttggaccgaattcgcaagctggctgaccagtgcacccgtcttcagggcttcttggttttccacagctttggtgggggaactggttctgggttcacctccctgctcatggaacgcctgtcagttgattatggcaagaaatccaagctggagttctccatttacccggcaccccaggtttccacagctgtagttgagccctacaactccatcctcaccacccacaccaccctggagcactctgattgtgccttcatggtagacaatgaggccatctatgacatctgtcgtagaaacctcgatatcgagcgcccaacctacactaaccttaaccgccttattagccagattgtgtcctccatcactgcttccctgagatttgatggagccctgaatgttgacctgacagaattccagaccaacctggtcccctacccccgcatccacttccctctggccacatatgcccctgtcatctctgctgagaaagcctaccatgaacagctttctgtagcagacatcaccaatgcttgctttgagccagccaaccagatggtgaaatgtgaccctggccatggtaaatacatggcttgctgcctgttgtaccgtggtgacgtggttcccaaagatgtcaatgctgccattgccaccatcaaaaccaagcgcacgatccagtttgtggattggtgccccactggcttcaaggttggcatcaactaccagcctcccactgtggtgcctggtggagacctggccaaggtacagagagctgtgtgcatgctgagcaacaccacagccattgctgaggcctgggctcgcctggaccacaagtttgacctgatgtatgccaagcgtgcctttgttcactggtacgtgggtgaggggatggaggaaggcgagttttcagaggcccgtgaagatatggctgcccttgagaaggattatgaggaggttggtgtggattctgttgaaggagagggtgaggaagaaggagaggaatactaattatccattccttttggccctgcagcatgtcatgctcccagaatttcagcttcagcttaactgacagatgttaaagctttctggttagattgttttcacttggtgatcatgtcttttccatgtgtacctgtaatatttttccatcatatctcaaagtaaagtcattaacatca

SEQ ID NO: 474 - DNA, 608 bp, Artificial Sequence
  Description of Artificial sequences:primer
  misc_feature (1)..(608): 3' terminal sequence from clone image:247909. atpase, h+ transporting, lysosomal 50/57kda, v1 subunit h(ATP6V1H) gene.
  misc_feature (407)..(407): n is a, c, g, or t
  misc_feature (424)..(424): n is a, c, g, or t
  misc_feature (434)..(434): n is a, c, g, or t
  misc_feature (470)..(470): n is a, c, g, or t
  misc_feature (481)..(481): n is a, c, g, or t
  misc_feature (503)..(503): n is a, c, g, or t
  misc_feature (521)..(521): n is a, c, g, or t
  misc_feature (537)..(537): n is a, c, g, or t
  misc_feature (550)..(550): n is a, c, g, or t
  misc_feature (561)..(561): n is a, c, g, or t
  misc_feature (570)..(570): n is a, c, g, or t
  misc_feature (583)..(583): n is a, c, g, or t
  misc_feature (601)..(601): n is a, c, g, or t
agattttaaaacatttatttgccattcactactttgcaacaattctcccaatttggtttgaaaagagacaacagttgacttttgttcaaagtccaagtaaagagagaggccatgtttggagtgagaatcctttaataactatatttatttccagagaacaataaatacagaaattgcaagcagtatatgtaacagtaatattttctttaaatacagaatcacctacttttatacaacttaacaggcaaacatgttattttgttgttgttgtttggaaattagcattgggaaaagctatataacagaggaaattccaagtaaaatcaaacagtgttcactcttaactctaaacacagtgctcccactactggttctgcattgaggccggagggggaaagggccagagnccgggcttaagctttcngggcgggcangggttctggggggctgctccggactgggagccggcntggccaagggnattcccccgaaaaaaaaggganggaaggtaagggggaatngggaatttcccatagncaagaatcccctncccaaattggngcccctttntgggccgggccanaaataccttccttttaanacccaaa

SEQ ID NO: 475 - DNA, 2093 bp, Artificial Sequence
  Description of Artificial sequences:primer
  misc_feature (1)..(2093): atpase, h+ transporting, lysosomal 50/57kda, v1 subunit h(ATP6V1H) gene.
tacctgtgcggccctcaacgtctccttggtgcgggacccgttcactttcggctcccggagtctccctccactgctcagacctctggacctgacaggagacgcctacttggctctgacgcggcgccccagcccggctgtgtccccggcgccccggaccaccctccctgccggctttgggtgcgttgtggggtcccgaggatttgttgaaagacattcaagattacgaagtttagatgaccaaaatggatatccgaggtgctgtggatgctgctgtccccaccaatattattgctgccaaggctgcagaagttcgtgcaaacaaagtcaactggcaatcctatcttcagggacagatgatttctgctgaagattgtgagtttattcagaggtttgaaatgaaacgaagccctgaagagaagcaagagatgcttcaaactgaaggcagccagtgtgctaaaacatttataaatctgatgactcatatctgcaaagaacagaccgttcagtatatactaactatggtggatgatatgctgcaggaaaatcatcagcgtgttagcattttctttgactatgcaagatgtagcaagaacactgcgtggccctactttctgccaatattgaatcgccaggatcccttcactgttcatatggcagcaagaattattgccaagttagcagcttggggaaaagaactgatggaaggcagtgacttaaattactatttcaattggataaaaactcagctgagttcacagaaactgcgtggtagcggtgttgctgttgaaacaggaacagtctcttcaagtgatagttcgcagtatgtgcagtgcgtggccgggtgtttgcagctgatgctccgggtcaatgagtaccgctttgcttgggtggaagcagatggggtaaattgcataatgggagtattgagtaacaagtgtggctttcagctccagtatcaaatgattttttcaatatggctcctggcattcagtcctcaaatgtgtgaacacctgcggcgctataatatcattccagttctgtctgatatccttcaggagtctgtcaaagagaaagtaacaagaatcattcttgcagcatttcgtaactttttagaaaaatcaactgaaagagaaactcgccaagaatatgccctggctatgattcagtgcaaagttctgaaacagttggagaacttggaacagcagaagtacgatgatgaagatatcagcgaagatatcaaatttcttttggaaaaacttggagagagtgtccaggaccttagttcatttgatgaatacagttcagaacttaaatctggaaggttggaatggagtcctgtgcacaaatctgagaaattttggagagagaatgctgtgaggttaaatgagaagaattatgaactcttgaaaatcttgacaaaacttttggaagtgtcagatgatccccaagtcttagctgttgctgctcacgatgttggagaatatgtgcggcattatccacgaggcaaacgggtcatcgagcagctcggtgggaagcagctggtcatgaaccacatgcatcatgaagaccagcaggtccgctataatgctctgctggccgtgcagaagctcatggtgcacaactgggaataccttggcaagcagctccagtccgagcagccccagaccgctgccgcccgaagctaagcctgcctctggccttcccctccgcctcaatgcagaaccagtagtgggagcactgtgtttagagttaagagtgaacactgtttgattttacttggaatttcctctgttatatagcttttcccaatgctaatttccaaacaacaacaacaaaataacatgtttgcctgttaagttgtataaaagtaggtgattctgtatttaaagaaaatattactgttacatatactgcttgcaatttctgtatttattgttctctggaaataaatatagttattaaaggattctcactccaaacatggcctctctctttacttggactttgaacaaaagtcaactgttgtctcttttcaaaccaaattgggagaattgttgcaaagtagtgaatggcaaataaatgttttaaaatct

SEQ ID NO: 476 - DNA, 428 bp, Artificial Sequence
  Description of Artificial sequences:primer
  misc_feature (1)..(428): 3' terminal sequence from clone image:248263. cytochrome c oxidase subunit vb(COX5B) gene.
  misc_feature (111)..(111): n is a, c, g, or t
  misc_feature (114)..(114): n is a, c, g, or t
  misc_feature (419)..(419): n is a, c, g, or t
gggagaaggagccaatgcaatggctagtctttactcggaaagaagaaactttacagcacattttgagtaatttagtgcaggtgctcagtgtgccagctgctggggcaccanttngttaatgggctccacagcgggggcatcgctgggcctcgcctttgtgcagccaaaaccagacgacgctggtattgtcctcttcacagatgcagcctactattctcttgttggagatggaggggactaaattagggtcttccctggtgcctgaagctccctttggggccaagtacattgtatgggtccagtcccttctttgcagccagcattgatctccctctccaacccagtcgcctgctctttcaacagtgggaaaaccacctccagatgccatggagcgcatcgggccgggccaatgggggccnaagcccttc

SEQ ID NO: 477 - DNA, 178 bp, Artificial Sequence
  Description of Artificial sequences:primer
  misc_feature (1)..(178): 5' terminal sequence from clone image:248263. cytochrome c oxidase subunit vb(COX5B) gene.
  misc_feature (8)..(8): n is a, c, g, or t
  misc_feature (11)..(11): n is a, c, g, or t
ctcgaggntcngcccacacgtggcgcggccgcactgcgctccatggcatctggaggtggtgttcccactgatgaagagcaggcgactgggttggagagggagatcatgctggctgcaaagaagggactggacccatacaatgtactggccccaaaggagcttcaggcaccagggaaga

SEQ ID NO: 478 - DNA, 523 bp, Artificial Sequence
  Description of Artificial sequences:primer
  misc_feature (1)..(523): cytochrome c oxidase subunit vb(COX5B) gene.
cggaagttttgctgctagtcgcggacgcaatggcttcaaggttacttcgcggagctggaacgctggccgcgcaggccctgagggctcgcggccccagtggcgcggccgcgatgcgctccatggcatctggaggtggtgttcccactgatgaagagcaggcgactgggttggagagggagatcatgctggctgcaaagaagggactggacccatacaatgtactggccccaaagggagcttcaggcaccagggaagaccctaatttagtcccctccatctccaacaagagaatagtaggctgcatctgtgaagaggacaataccagcgtcgtctggttttggctgcacaaaggcgaggcccagcgatgcccccgctgtggagcccattacaagctggtgccccagcagctggcacactgagcacctgcactaaattactcaaaatgtgctgtaaagtttcttctttccagtaaagactagccattgcattggctccttctcccataaaaaaaaaaaaaaaaaaa

SEQ ID NO: 479 - DNA, 446 bp, Artificial Sequence
  Description of Artificial sequences:primer
  misc_feature (1)..(446): 3' terminal sequence from clone image:248701. delta-like 1 homolog (drosophila)(DLK1) gene.
  misc_feature (425)..(425): n is a, c, g, or t
  misc_feature (446)..(446): n is a, c, g, or t
aaagatgaaattcttattattattctgtatcatgcattaagagagagaaagaggattgtttttgcattgcgtttgtcacacagcagcacaaagacaatatatgtaagcgtaggtacaccagatttgacacaagagatagcgaacaccacaaagattaggacagaccgcgtatagtaagctctgaggaactcaagaatcctagagggggctgtgggaacgctgcttagatctcctccgtcgccggcctccttgctgaaggtggtcatgtcgatcttctcggggaagatgatgttgacggccaggtcctccccgctgttgtactgaaagcagcaggttcttcttcttccgcagcatgtggttgtaagcgcaggtttggacaccccaggtctcgcactttgtttgaggaagaccgatacccacagtgnccagcaccaccaggctggtgn

SEQ ID NO: 480 - DNA, 1556 bp, Artificial Sequence
  Description of Artificial sequences:primer
  misc_feature (1)..(1556): delta-like 1 homolog (drosophila)(DLK1) gene.
ggcacgagggagagcgcagcgcgcagcccggtgcagccctggctttcccctcgctgcgcgcccgcgccccctttcgcgtccgcaaccagaagcccagtgcggcgccaggagccggacccgcgcccgcaccgctcccgggaccgcgaccccggccgcccagagatgaccgcgaccgaagccctcctgcgcgtcctcttgctcctgctggctttcggccacagcacctatggggctgaatgcttcccggcctgcaacccccaaaatggattctgcgaggatgacaatgtttgcaggtgccagcctggctggcagggtcccctttgtgaccagtgcgtgacctctcccggctgccttcacggactctgtggagaacccgggcagtgcatttgcaccgacggctgggacggggagctctgtgatagagatgttcgggcctgctcctcggccccctgtgccaacaacgggacctgcgtgagcctggacgatggcctctatgaatgctcctgtgcccccgggtactcgggaaaggactgccagaaaaaggacgggccctgtgtgatcaacggctccccctgccagcacggaggcacctgcgtggatgatgagggccgggcctcccatgcctcctgcctgtgcccccctggcttctcaggcaatttctgcgagatcgtggccaacagctgcacccccaacccatgcgagaacgacggcgtctgcactgacatcgggggcgacttccgctgccggtgcccagccggcttcatcgacaagacctgcagccgcccggtgaccaactgcgccagcagcccgtgccagaacgggggcacctgcctgcagcacacccaggtgagctacgagtgtctgtgcaagcccgagttcacaggtctcacctgtgtcaagaagcgcgcgctgagcccccagcaggtcacccgtctgcccaacggctatgggctggcctaccgcctgacccctggggtgcacgagctgccggtgcagcagccggagcaccgcatcctgaaggtgtccatgaaagagctcaacaagaaaacccctctcctcaccgagggccaggccatctgcttcaccatcctgggcgtgctcaccagcctggtggtgctgggcactgtgggtatcgtcttcctcaacaagtgcgagacctgggtgtccaacctgcgctacaaccacatgctgcggaagaagaagaacctgctgcttcagtacaacagcggggaggacctggccgtcaacatcatcttccccgagaagatcgacatgaccaccttcagcaaggaggccggcgacgaggagatctaagcagcgttcccacagccccctctagattcttggagttcctcagagcttactatacgcggtctgtcctaatctttgtggtgttcgctatctcttgtgtcaaatctggtgaacgctacgcttacatatattgtctttgtgctgctgtgtgacaaacgcaatgcaaaaacaatcctctttctctctcttaatgcatgatacagaataataataagaatttcatctttaaaaaaaaaaaaaaaaaa

SEQ ID NO: 481 - DNA, 235 bp, Artificial Sequence
  Description of Artificial sequences:primer
  misc_feature (1)..(235): 3' terminal sequence from clone image:24884. contactin 1(CNTN1) gene.
  misc_feature (63)..(63): n is a, c, g, or t
  misc_feature (115)..(115): n is a, c, g, or t
  misc_feature (125)..(125): n is a, c, g, or t
  misc_feature (197)..(197): n is a, c, g, or t
  misc_feature (209)..(209): n is a, c, g, or t
  misc_feature (216)..(216): n is a, c, g, or t
tttttttttttgcatttggcaaaagatttagttgttgattatataaaaatacccaacatgggncacattgcaaaattaaaaccccaaagtgtaacaatgaaaacacaaacatttntacagaaggnatacagggtattcgtttccctaaagtatgaagacattttgtttctttttcaaatacttaaatattttatgantctggcaatgancttaagnctgttgacatacttccact

SEQ ID NO: 482 - DNA, 471 bp, Artificial Sequence
  Description of Artificial sequences:primer
  misc_feature (1)..(471): 5' terminal sequence from clone image:24884. contactin 1(CNTN1) gene.
  misc_feature (254)..(254): n is a, c, g, or t
  misc_feature (415)..(415): n is a, c, g, or t
gtcgttgcactatcaaatgaatctacagtgacgggatataaggtactctacagaccctgatggccagcatgatggaagctgtattcaactcacaaacactccatagaagtcccaatccccagagatggagaatacgttgtggaggttcgcgcgcacagtgatggaggagatggagtggtgtctcaagtcaaaatttcaggtgtacccaccctatccccaagtcttctcggcttactgctgcctgcctttggatnccttgtctacttggaattctgaatgtgttgtgacagctgctgttcccatcccagctcagaagacacccttcaaccctggggatgaccacaattccttccaatttctgcggctccatccttaagccaaattaaattatactttaacaaacttattccaactngattttacaacacacatggatggactgagggctttcgggggaacccctttcatcca

SEQ ID NO: 483 - DNA, 3427 bp, Artificial Sequence
  Description of Artificial sequences:primer
  misc_feature (1)..(3427): contactin 1(CNTN1) gene.
gctgtgccgcaccgaggcgagcaggagcagggaacaggtgtttaaaattatccaactgccatagagctaaattcttttttggaaaattgaaccgaacttctactgaatacaagatgaaaatgtggttgctggtcagtcatcttgtgataatatctattactacctgtttagcagagtttacatggtatagaagatatggtcatggagtttctgaggaagacaaaggatttggaccaatttttgaagagcagccaatcaataccatttatccagaggaatcactggaaggaaaagtctcactcaactgtagggcacgagccagccctttcccggtttacaaatggagaatgaataatggggacgttgatctcacaagtgatcgatacagtatggtaggaggaaaccttgttatcaacaaccctgacaaacagaaagatgctggaatatactactgtttagcatctaataactacgggatggtcagaagcactgaagcaaccctgagctttggatatcttgatcctttcccacctgaggaacgtcctgaggtcagagtaaaagaagggaaaggaatggtgcttctctgtgaccccccataccattttccagatgatcttagctatcgctggcttctaaatgaatttcctgtatttatcacaatggataaacggcgatttgtgtctcagacaaatggcaatctctacattgcaaatgttgaggcttccgacaaaggcaattattcctgctttgtttccagtccttctattacaaagagcgtgttcagcaaattcatcccactcattccaatacctgaacgaacaacaaaaccatatcctgctgatattgtagttcagttcaaggatgtatatgcattgatgggccaaaatgtgaccttagaatgttttgcacttggaaatcctgttccggatatccgatggcggaaggttctagaaccaatgccaagcactgctgagattagcacctctggggctgttcttaagatcttcaatattcagctagaagatgaaggcatctatgaatgtgaggctgagaacattagaggaaaggataaacatcaagcaagaatttatgttcaagcattccctgagtgggtagaacacatcaatgacacagaggtggacataggcagtgatctctactggccttgtgtggccacaggaaagcccatccctacaatccgatggttgaaaaatggatatgcgtatcataaaggggaattaagactgtatgatgtgacttttgaaaatgccggaatgtatcagtgcatagctgaaaacacatatggagccatttatgcaaatgctgagttgaagatcttggcgttggctccaacttttgaaatgaatcctatgaagaaaaagatcctggctgctaaaggtggaagggtgataattgaatgcaaacctaaagctgcaccgaaaccaaagttttcatggagtaaagggacagagtggcttgtcaatagcagcagaatactcatttgggaagatggtagcttggaaatcaacaacattacaaggaatgatggaggtatctatacatgctttgcagaaaataacagagggaaagctaatagcactggaacccttgttatcacagatcctacgcgaattatattggccccaattaatgccgatatcacagttggagaaaacgccaccatgcagtgtgctgcgtcctttgatcctgccttggatctcacatttgtttggtccttcaatggctatgtgatcgattttaacaaagagaatattcactaccagaggaattttatgctggattccaatggggaattactaatccgaaatgcgcagctgaaacatgctggaagatacacatgcactgcccagacaattgtggacaattcttcagcttcagctgaccttgtagtgagaggccctccaggccctccaggtggtctgagaatagaagacattagagccacttctgtggcacttacttggagccgtggttcagacaatcatagtcctatttctaaatacactatccagaccaagactattctttcagatgactggaaagatgcaaagacagatcccccaattattgaaggaaatatggaggcagcaagagcagtggacttaatcccatggatggagtatgaattccgcgtggtagcaaccaatacactgggtagaggagagcccagtataccatctaacagaattaaaacagacggtgctgcaccaaatgtggctccttcagatgtaggaggtggaggtggaagaaacagagagctgaccataacatgggcgcctttgtcaagagaataccactatggcaacaattttggttacatagtggcatttaagccatttgatggagaagaatggaaaaaagtcacagttactaatcctgatactggccgatatgtccataaagatgaaaccatgagcccttccactgcatttcaagttaaagtcaaggccttcaacaacaaaggagatggaccttacagcctagtagcagtcattaattcagcacaagacgctcccagtgaagccccaacagaagtaggtgtaaaagtcttatcatcttctgagatatctgttcattgggaacatgttttagaaaaaatagtggaaagctatcagattcggtattgggctgcccatgacaaagaagaagctgcaaacagagttcaagtcaccagccaagagtactcggccaggctcgagaaccttctgccagacacccagtattttatagaagtcggggcctgcaatagtgcagggtgtggacctccaagtgacatgattgaggctttcaccaagaaagcacctcctagccagcctccaaggatcatcagttcagtaaggtctggttcacgctatataatcacctgggatcatgtcgttgcactatcaaatgaatctacagtgacgggatataaggtactctacagacctgatggccagcatgatggcaagctgtattcaactcacaaacactccatagaagtcccaatccccagagatggagaatacgttgtggaggttcgcgcgcacagtgatggaggagatggagtggtgtctcaagtcaaaatttcaggtgcacccaccctatccccaagtcttctcggcttactgctgcctgcctttggcatccttgtctacttggaattctgaatgtgttgtgacagctgctgttcccatcccagctcagaagacacccttcaaccctgggatgaccacaattccttccaatttctgcggctccatcctaagccaaataaattatactttaacaaactattcaactgatttacaacacacatgatgactgaggcattcgggaaccccttcatccaaaagaataaacttttaaatggatataaatgatttttaactcgttccaatatgccttataaaccacttaacctgat

SEQ ID NO: 484 - DNA, 411 bp, Artificial Sequence
  Description of Artificial sequences:primer
  misc_feature (1)..(411): 3' terminal sequence from clone image:251772. cell division cycle 42 (gtp binding protein, 25kda)(CDC42) gene.
  misc_feature (1)..(1): n is a, c, g, or t
  misc_feature (63)..(63): n is a, c, g, or t
  misc_feature (97)..(97): n is a, c, g, or t
  misc_feature (228)..(228): n is a, c, g, or t
  misc_feature (241)..(241): n is a, c, g, or t
  misc_feature (250)..(250): n is a, c, g, or t
  misc_feature (349)..(349): n is a, c, g, or t
  misc_feature (359)..(359): n is a, c, g, or t
  misc_feature (366)..(366): n is a, c, g, or t
ngtgaagggtttttgtttgtttaatacatctgaaaagaatgcatatacaaagaattgagacangagaaagcattggttcaacactaatgcatctacnagaattaggtttgggaaggtgggaaagattacctcaacatttttaaaaattggaaactgcaaccaaaataagctgaaaaaatccctattaacacttaagaagagtctgcattaagagtctttccatgattnttattaaactagngagcctcanctggctgctctagggttcctcatatgcaaaacagaaataaggggattcccctgactgggtccccaatgttgttaagtgttctccccacccccaccctanccccagcttnttaaatngaaggcaggcctccatcctcctaactttgagaggatgtgaatcct

SEQ ID NO: 485 - DNA, 2183 bp, Artificial Sequence
  Description of Artificial sequences:primer
  misc_feature (1)..(2183): cell division cycle 42 (gtp binding protein, 25kda)(CDC42) gene.
ggcagccgaggagaccccgcgcagtgctgccaacgccccggtggagaagctgaggtcatcatcagatttgaaatatttaaagtggatacaaaattatttcagcaatgcagacaattaagtgtgttgttgtgggcgatggtgctgttggtaaaacatgtctcctgatatcctacacaacaaacaaatttccatcggaatatgtaccgactgtttttgacaactatgcagtcacagttatgattggtggagaaccatatactcttggactttttgatactgcagggcaagaggattatgacagattacgaccgctgagttatccacaaacagatgtatttctagtctgtttttcagtggtctctccatcttcatttgaaaacgtgaaagaaaagtgggtgcctgagataactcaccactgtccaaagactcctttcttgcttgttgggactcaaattgatctcagagatgacccctctactattgagaaacttgccaagaacaaacagaagcctatcactccagagactgctgaaaagctggcccgtgacctgaaggctgtcaagtatgtggagtgttctgcacttacacagaaaggcctaaagaatgtatttgacgaagcaatattggctgccctggagcctccagaaccgaagaagagccgcaggtgtgtgctgctatgaacatctctccagagccctttctgcacagctggtgtcggcatcatactaaaagcaatgtttaaatcaaactaaagattaaaaattaaaattcgtttttgcaataatgacaaatgccctgcacctacccacatgcactcgtgtgagacaaggcccataggtatggccccccccttccccctcccagtactagttaattttgagtaattgtattgtcagaaaagtgattagtactatttttttttgttgtttcaaaaaaaaaatttttgtgtgtctgtttttttttttttttttttttgttgtttaaaaggaaggcatgcttgtggatgactctgtaacagactaattggaattgttgaagctgctccctggttccactctggagagtaatctgggacatcttagtgttttgttttgtttttttccctcctcttttttttgggggggagtgtgtgtggggtttgttttttagtcttgtttttttaattcattaaccagtggttagcccttaaggggaggaggacggattgattccacattccacttcctagatctagtttagaaaacatgttccccatctggtgctcttaggaaggagtatagtaaatgcctcatttaataacatactcctttttgaaagttgccttttctctccacccttgagtagatccagtatttgatgaaactcatgaaagtgggtggagcccatcttgcccctcctcttttctaggacgcactatatgtgactgtgactttcaaggacatttgtttgccatttgctgatttttttgggaagttaatttctaacttctttcactgataaatgaagaaaagtattgcacctttgaaatgcaccaaatgaattgagtttgtaattaaaaaaatttttttccctttcagtcattgtcttatatgcttagcatagatttgcagctcagtagtatatggtgttcctagaatgcagctgaagacctgttatgtagaggaaatacgaggggtggtgctagaagacagacatctgtggaatgattcacatcctctcaagttaggaggatggaggcctgcttcattaagaagctgggggtagggtgggggtggggagaacacttaacaacatggggaccagtcaggggaatccccttatttctgttttgcatatgaggaaccctagagcagccaggtgaggctctctagtttaataaaaatcatggaaagactcttaatgcagactcttcttaagtgttaatagggattttttcagcttattttggttgcagtttccaatttttaaaaatgttgaggtaatctttcccaccttcccaaacctaattcttgtagatgcattagtgttgaaccaatgctttctcatgtctcaattctttgtatatgcattcttttcagatgtattaaacaaacaaaaacccttcaaaaaaaaaaaaaaaaaaaaaaaaaaaaaaaaaaaaaaaaaaaaaaaaaaaaaaaaaaaaaaaaaaaaaaaaaaaaaaa

SEQ ID NO: 486 - DNA, 476 bp, Artificial Sequence
  Description of Artificial sequences:primer
  misc_feature (1)..(476): 3' terminal sequence from clone image:25222. sco cytochrome oxidase deficient homolog 1 (yeast)(SCO1) gene.
  misc_feature (332)..(332): n is a, c, g, or t
  misc_feature (353)..(353): n is a, c, g, or t
  misc_feature (361)..(361): n is a, c, g, or t
  misc_feature (372)..(372): n is a, c, g, or t
  misc_feature (379)..(379): n is a, c, g, or t
  misc_feature (394)..(394): n is a, c, g, or t
  misc_feature (451)..(451): n is a, c, g, or t
  misc_feature (468)..(468): n is a, c, g, or t
tttttttttgaacagcaaaactgagtatgtttactttacacaaagtacaatccagtatatgcagaaagctactcagcatcacactcgtgatcaatatcctcttatttccatttggtatgtcactgaaaacctggcacaccacttagctaaaaatcacataaaagaacccctagagaaatcaaactgatgttttttttcccccaaacaatagatttcctcttcattagtcaaatctgatagtgatattcattaataagggaaactaaagttttcaagcatcaactctgaatgggcagagaccctaatctgactgttattaggccaccaagganctcaggaaggaggcaaagganctcaaggnaggtggggccnggcaagnaggcacttatggggnaatttattattcctttttctggtggaaatttcaggtccccacaggctatttgaggcnaggggggcccaggacgntggggaga

SEQ ID NO: 487 - DNA, 1719 bp, Artificial Sequence
  Description of Artificial sequences:primer
  misc_feature (1)..(1719): sco cytochrome oxidase deficient homolog 1 (yeast)(SCO1) gene.
gtctccgaggctcatggcgatgctggtcctagtacccggacgagttatgcggcctctgggtggccaactttggcgcttcttgcctcgcggactcgagttttggggcccagccgaggggactgcgagagtcttgctgaggcagttctgcgcgcggcaagcggaggcgtggcgtgcctcggggcgccctggctattgcctgggaacccggcccctcagcactgcgaggccgccacccccgtggtcgcagaagggccccggagactccacgcgcccctcgaagcccgggcctgtttcctggaagtctttagcaatcacatttgctattggaggagctttactggctggaatgaagcacgtcaagaaagaaaaggcagagaagttagagaaggaacggcagcgacacatcggcaagcctttacttgggggaccgttttccctcacaactcatactggggagcgtaaaactgacaaggactacttgggtcagtggttattgatttattttggcttcactcattgccctgatgtctgtccagaagaactagaaaagatgattcaagtcgtggatgaaatagatagcattacaactctgccagatctaactccacttttcatcagcattgacccagagagggacacaaaagaagccatcgcaaattatgtgaaagaattttctcccaaactggttggcttgactggcacgagagaagaggtcgatcaagtggccagagcatacagagtgtattacagccctggccccaaggacgaagatgaagactacatagtggatcacacaataataatgtacttgattggaccagatggtgagtttctagattattttggccagaacaagaggaagggagaaatagctgcttcaattgccacacacatgaggccatacagaaaaaagagctagccaaagcagtgttgctggatgcagtattctcttgctaagaggaaggaaactgtctcgcataggagcctatataaatataaacatatatacgtgcactctacagaatggccttcataccatgagaacatttctgttttggatggggatgttacccttgcgttcaaccaaaattgattcttggaactgtaaagattacaacccaaagtctcccaggaagctgtggggagaccagaggatcaagctgaagtgaagccagtgaagagcccacctgtggaaggacatggcggggcgaggcacagccagtgcattcctgcctgcgaacaggccctcccagcagctttgccgcctctccatcgtcttgggcccttgctcaaatagctgtgggactgaatttcacagaaaagaatataatttccatagtgctcttgcttgcctcttcttgagttctttgctcttctgagttcttggtggctaataacagtcagattagggtctctgccattcagagttgatgcttgaaaactttagttttccttattaatgaatatcactatcagatttgactaatgaagaggaaatctattgtttgggggaaaaaaaacatcagtttgatttctctaggggttcttttatgtgatttttagctaagtggtgtgccaggttttcagtgacataccaaatggaaataagaggatattgatcacgagtgtgatgctgagtacctttctgcatatactggattgtactttgtgtaaagtaaacatactcagttttgctgttcaaaaaaaaaaaaaaaaaaa

SEQ ID NO: 488 - DNA, 327 bp, Artificial Sequence
  Description of Artificial sequences:primer
  misc_feature (1)..(327): 3' terminal sequence from clone image:25285. hypothetical protein loc51058(LOC51058) gene.
  misc_feature (95)..(95): n is a, c, g, or t
  misc_feature (300)..(300): n is a, c, g, or t
ttttttttcattgaatgggttttactgctaatcactctggggaaaacaagaggcaggttgggggagggataacaagtaacaaacatgggggagtntgaaggtccctgggtcatggctccctgagggtttccctttcatttctaaggtgggacctcagatctcttctccagaccaaggaggccccttccattgagaaggtcactcctcccaccgcagagatctagaagcaaagttggggcacaacaggtgggaactagcaggaaactgcagtgcactcctacctaagcagttcacagacantttggagaacctttcagacagtgacac

SEQ ID NO: 489 - DNA, 1591 bp, Artificial Sequence
  Description of Artificial sequences:primer
  misc_feature (1)..(1591): hypothetical protein loc51058(LOC51058) gene.
ccctcgcctacagaggcggcgctgtccctgatcgagcggcgggagcgagggttcagagatgggcagtgagaaggagcagagtccagaaccacacctgcctgaggaaggggaagggggtaagccttggagagtggatgactcagagggttcttggatcccacctggggagaaggagcatgggcaagagagcctgtcggatgaactgcaagaaactcatccaaaaaagccatggcagaaagtcactgtccgggctcgagagctaggggaccccattgctcatccaaggcatgaggcagatgagaagccctttatatgtgcccagtgtggcaaaaccttcaataatacctccaacctgagaacacaccagcggatccacactggtgagaagccttacaagtgttctgaatgtggcaagagcttctcgagaagctccaaccgcatccggcacgagcggatccacctggaagagaaacactacaaatgccccaagtgccaggagagctttcggcggcgctcagacctcaccacgcaccagcaagatcacctaggcaagcggccataccgctgtgacatctgtggcaagagcttcagccagagtgccacgctagctgtgcatcaccggacccacctggagccagcaccctacatctgctgtgagtgtgggaagagcttcagcaacagctccagctttggcgtgcatcaccgcacccacacaggtgagagaccttatgagtgcactgagtgtgggcggaccttcagcgatatctccaactttggagcacaccagcggacccacagaggggagaagccctaccggtgcactgtgtgtgggaaacacttctcccggagctcgaatctcatccgccaccagaaaactcacttgggcgaacaggctgggaaagattccagctgaaggagagccccatttagagtgagggagagagagtgagagaccctaacctattggaggaagatcttcagcatcttttgctgctaccttgacctcaagcccttcatcccactttggagaatggttttgtatagcctctgaagtcaggatctcaggaagtcctgaggagggactctggaataaaaacccttgcctctttccaggccaatttctcgtgttggaaagtcagaagacccagtcttggctttactttcttggggtgaaagagaaatagggtaggctcagaacatgctcatgttattaaggcagcagtccccctggcctttgaggaagtacttatgagatgggtgtcactgtctgaaggttctccaaattgtctgtgaactgcttaggtaggagtgcactgcagtttcctgctagttcccacctgttgtgccccaactttgcttctagatctctggggtgggaggagtgaccttctcaatggaaggggcctccttggtctggagaagagatctgaggtcccaccttagaaatgaaagggaaaccctcagggagccatgacccagggaccttcacactcccccatgtttgttacttgttatccctcccccaacctgcctctgttttccccagagtgattagcagtaaaacccttcaatgaaaaaaaaaaaaaaaaaa

SEQ ID NO: 490 - DNA, 417 bp, Artificial Sequence
  Description of Artificial sequences:primer
  misc_feature (1)..(417): 3' terminal sequence from clone image:25392. v-ral simian leukemia viral oncogene homolog b (ras related, gtp binding protein)(RALB) gene.
  misc_feature (10)..(10): n is a, c, g, or t
  misc_feature (322)..(322): n is a, c, g, or t
  misc_feature (356)..(356): n is a, c, g, or t
  misc_feature (362)..(362): n is a, c, g, or t
  misc_feature (370)..(370): n is a, c, g, or t
tttttttttnttttctatttgtctgctttttaattcaaaaaaaaagcccatgattctttgggaggggatacaaggattgttttccagtcagatcataatttctaccatctctgtgacaatcataaattcaaaaggttcccactctccgcaccccgattcacttttggcacctatatatgaaatgtcgcttctgaaaaatggggaaaaaatgtgaatactgggctcttcccacagtgctcctttcctgatgaaaatctttcagtttgctcaatttaggaatacttgatgcaagaaagtttaaaggtatgtcatcaatggaaantctttttctaactatctgggctatcttagggaantaattntattaggnaacagcagcccaattctcaggagggccaggggggccgatgggcttta

SEQ ID NO: 491 - DNA, 442 bp, Artificial Sequence
  Description of Artificial sequences:primer
  misc_feature (1)..(442): 5' terminal sequence from clone image:25392. v-ral simian leukemia viral oncogene homolog b (ras related, gtp binding protein)(RALB) gene.
  misc_feature (379)..(379): n is a, c, g, or t
  misc_feature (392)..(392): n is a, c, g, or t
  misc_feature (400)..(400): n is a, c, g, or t
  misc_feature (435)..(435): n is a, c, g, or t
aacaagaaaagttttaaagaaagatgttgcttactatgagtgtcaaggtgacggatgaagccagctgctcctaaggacacagggctgggttggtaaagagaaggctatggttgacttcttgcttgtgcttcccactctccccgacttcattcactcaaacttctttaaatggggaaaaatatttgtgactcagtggctggcagaagaaataagcccatgcaagtggaagggctgctttgtcaggaggttgtggaatttctttcttctccccttcttccctcccaaaagcttagctatgtataaagtgccacagatagggaaacagctgttaattacaaaggaggaaaggaattgttcataggcatcttattttgttccnagttttattaacntttacccntcctttcgtttttggaactacaggtgttgttagtnggggttt

SEQ ID NO: 492 - DNA, 1327 bp, Artificial Sequence
  Description of Artificial sequences:primer
  misc_feature (1)..(1327): v-ral simian leukemia viral oncogene homolog b (ras related gtp binding protein)(RALB) gene.
gagcccggcagctcaatgacaaatcggtggaggacggctggggtccggccccgggagggcccggggcgcgtttaagagctgcgggccgggtgcggacggcggaggcggcgggactggtccctgctcttcagtgggtcatctgtgtgtcacagcctcagaagaccagcgagatggctgccaacaagagtaagggccagagctccttggccctccacaaggtgatcatggttggcagcggaggcgttggcaagtcagccctgacgcttcagttcatgtatgacgagtttgtagaagactatgaacctaccaaagctgacagttatagaaagaaagtggttcttgatggggaagaagttcagatagatattctggacaccgctgggcaagaggactacgcagccattcgagataactactttcggagtggggaagggtttcttcttgtgttctcaatcacagaacatgaatcctttacagcaactgccgaattcagggaacagattctccgtgtgaaggctgaagaagataaaattccactgctcgtcgtgggaaacaagtctgacctagaggagcggaggcaggtgcctgtggaggaggccaggagtaaagccgaagagtggggcgtgcagtacgtggagacgtcagcgaagacccgggccaacgtggacaaggtgttctttgacctaatgagagaaatcagaacaaagaagatgtcagaaaacaaagacaagaatggcaagaaaagcagcaagaacaagaaaagttttaaagaaagatgttgcttactatgagtgtcaaggtgacggatgaagccagctgctcctaaggacacagggctgggttggtaaagagaaggctatggttgacttcttgcttgtgcttcccactctccccgacttcattcactcaaacttctttaaatggggaaaaatatttgtgactctgtggctggcagaagaaataagcccatgcaagtggaagggctgctttgtcaggaggttgtggaatttctttcttctccccttcttccctcccaaaagcttagctatgtataaagtgccacagataggaaacagctgttaattacaaagagaaagaattgtcatagcatcttattttgttcctagttttataacattaccatccttcgttttgaactacagatgttgtagtgggttttggaggagggagtggagtaagatgccctcccacttttatcagtttagtagtagtactgagaaaaatcccttcagctctaagaacactgaaaaatccaccgattttttgggtaagcttcttggcaataccctgtggatctgaaacagct

SEQ ID NO: 493 - DNA, 493 bp, Artificial Sequence
  Description of Artificial sequences:primer
  misc_feature (1)..(493): 3' terminal sequence from clone image:254505. ribosomal protein l3(RPL3) gene.
  misc_feature (487)..(487): n is a, c, g, or t
tttttttttttttttttttttttttttcagtggaaaataacttttattgagaccccaccaactgcaaaatctgttcctggcattaagctccttcttcctttgcaattcggtctttcttcagtggtcccatgaatgctttcttctcctccatggtctggaagcggccatggcaaacttggaggtggtgtcaatgaacttaaggtcaatcttctccagagcccgccgcttcgtctgcaccagcaacggacttgcggagggtgagcacccgcttcttggttcccaccacacagcctttcagcatgacaaagtcattggtcacttcaccatagtggacaaagccacccagaggtttgatggctcttgtcagataggtcatagtcagtggaggcattgttcttgatcagcttgccgtccttgataaggtagccctggccaatcttaaaaatccttcctggttgatctcagtgcggtgatggtagccttctgnccaggg

SEQ ID NO: 494 - DNA, 1311 bp, Artificial Sequence
  Description of Artificial sequences:primer
  misc_feature (1)..(1311): ribosomal protein l3(RPL3) gene.
ctctaccggcgggatttgatggcgtgatgtctcacagaaagttctccgctcccagacatgggtccctcggcttcctgcctcggaagcgcagcagcaggcatcgtgggaaggtgaagagcttccctaaggatgacccgtccaagccggtccacctcacagccttcctgggatacaaggctggcatgactcacatcgtgcgggaagtcgacaggccgggatccaaggtgaacaagaaggaggtggtggaggctgtgaccattgtagagacaccacccatggtggttgtgggcattgtgggctacgtggaaacccctcgaggcctccggaccttcaagactgtctttgctgagcacatcagtgatgaatgcaagaggcgtttctataagaattggcataaatctaagaagaaggcctttaccaagtactgcaagaaatggcaggatgaggatggcaagaagcagctggagaaggacttcagcagcatgaagaagtactgccaagtcatccgtgtcattgcccacacccagatgcgcctgcttcctctgcgccagaagaaggcccacctgatggagatccaggtgaacggaggcactgtggccgagaagctggactgggcccgcgagaggcttgagcagcaggtacctgtgaaccaagtgtttgggcaggatgagatgatcgacgtcatcggggtgaccaagggcaaaggctacaaaggggtcaccagtcgttggcacaccaagaagctgccccgcaagacccaccgaggcctgcgcaaggtggcctgtattggggcatggcatcctgctcgtgtagccttctctgtggcacgcgctgggcagaaaggctaccatcaccgcactgagatcaacaagaagatttataagattggccagggctaccttatcaaggacggcaagctgatcaagaacaatgcctccactgactatgacctatctgacaagagcatcaaccctctgggtggctttgtccactatggtgaagtgaccaatgactttgtcatgctgaaaggctgtgtggtgggaaccaagaagcgggtgctcaccctccgcaagtccttgctggtgcagacgaagcggcgggctctggagaagattgaccttaagttcattgacaccacctccaagtttggccatggccgcttccagaccatggaggagaagaaagcattcatgggaccactgaagaaagaccgaattgcaaaggaagaaggagcttaatgccaggaacagattttgcagttggtggggtctcaataaaagttattttccactgaaaaaaaaaaaaaaaaaa

SEQ ID NO: 495 - DNA, 437 bp, Artificial Sequence
  Description of Artificial sequences:primer
  misc_feature (1)..(437): 3' terminal sequence from clone image:255348. secretory leukocyte protease inhibitor (antileukoproteinase)(SLPI) gene.
  misc_feature (14)..(14): n is a, c, g, or t
  misc_feature (332)..(332): n is a, c, g, or t
  misc_feature (345)..(345): n is a, c, g, or t
tttttttttttttngcaaagagaaataggctcgtttatttattcattgatcaactggcacttcttgaaagcctgctgtgtgccaagcctttccccaaaggaggatatcagtggtggagccaagtctcagggtggaaaggacctggaccacacagagcaggactccagagcctcctccatatggcaggaatcaagctttcacaggggaaacgcaggatttcccacacatgcccatgcaacacttcaagtcacgcttgcactggccatccatctcacagaaattgggggggttaagcatcaaacattggccataagtcactgggcacttcccanggcttcctccttnttgggtttcggggtgtcaacaggatccaggcatttggatgccacaagtgtcaggacaacatgtcttcttccctgggacactgcagtcactct

SEQ ID NO: 496 - DNA, 598 bp, Artificial Sequence
  Description of Artificial sequences:primer
  misc_feature (1)..(598): secretory leukocyte protease inhibitor (antileukoproteinase)(SLPI) gene.
cagagtcactcctgccttcaccatgaagtccagcggcctcttccccttcctggtgctgcttgccctgggaactctggcaccttgggctgtggaaggctctggaaagtccttcaaagctggagtctgtcctcctaagaaatctgcccagtgccttagatacaagaaacctgagtgccagagtgactggcagtgtccagggaagaagagatgttgtcctgacacttgtggcatcaaatgcctggatcctgttgacaccccaaacccaacaaggaggaagcctgggaagtgcccagtgacttatggccaatgtttgatgcttaacccccccaatttctgtgagatggatggccagtgcaagcgtgacttgaagtgttgcatgggcatgtgtgggaaatcctgcgtttcccctgtgaaagcttgattcctgccatatggaggaggctctggagtcctgctctgtgtggtccaggtcctttccaccctgagacttggctccaccactgatatcctcctttggggaaaggcttggcacacagcaggctttcaagaagtgccagttgatcaatgaataaataaacgagcctatttctctttgcac

SEQ ID NO: 497 - DNA, 436 bp, Artificial Sequence
  Description of Artificial sequences:primer
  misc_feature (1)..(436): 3' terminal sequence from clone image:256846. homeodomain interacting protein kinase 3(HIPK3) gene.
  misc_feature (298)..(298): n is a, c, g, or t
  misc_feature (374)..(374): n is a, c, g, or t
  misc_feature (392)..(392): n is a, c, g, or t
  misc_feature (431)..(431): n is a, c, g, or t
aagccatagacatgtggtcattgggatgtgtgattgcagaattatttcttggatggccgctctacccaggagccttggagtatgatcagattcgatacatttctcagactcaaggtttgccaggagaacagttgttaaatgtgggtactaaatccacaagatttttgcaaagaaacagatatgtctcattctggttggagattaaagacattggaagagcatgaggcagagacaggaatgaagtctaaagaagccagaaaatacattttcaacagtctgggatgatgtagcgcatgtnaacacagtgatgggatttgggaaggaagttgatcttttggctgaagaaagctgataagaagagatttggttagtcngttgaagaaaatgttgcngattgatgcagatttaagaattactccagctgagacccngaacc

SEQ ID NO: 498 - DNA, 456 bp, Artificial Sequence
  Description of Artificial sequences:primer
  misc_feature (1)..(456): 5' terminal sequence from clone image:256846. homeodomain interacting protein kinase 3(HIPK3) gene.
  misc_feature (158)..(159): n is a, c, g, or t
  misc_feature (162)..(162): n is a, c, g, or t
  misc_feature (166)..(166): n is a, c, g, or t
  misc_feature (413)..(413): n is a, c, g, or t
tttcttggtagtggcaggctgaggcagacaacatgtgcaatccccacactaactggctgaggggcagataaagttatctgattggtcagaagaggctgcggcatcactgagttataatgattgctgcatgaaatcatcttcccccagtctccaagccnngtntganccagccacactctcagaagttagtgtagtagtagcaggagccaggggtgtcacctgttgccaggcaggcaccagcatctgctgtgttctaccagaccacgtctgagaaagaactcctggtcggatctgtagtggctgcacagctggggcctgagttacaagtggaactgtattatctacccttattggaataactgggtggggttttaccatgtggttgcaggaataccttggaatagctggggggnccagataatcaatgtctgcctgaaaagcatccaccacaaccag

SEQ ID NO: 499 - DNA, 3657 bp, Artificial Sequence
  Description of Artificial sequences:primer
  misc_feature (1)..(3657): homeodomain interacting protein kinase 3(HIPK3) gene.
taggaaggtatggcctcacaagtcttggtctacccaccatatgtttatcaaactcagtcaagtgccttttgtagtgtgaagaaactcaaagtagagccaagcagttgtgtattccaggaaagaaactatccacggacctatgtgaatggtagaaactttggaaattctcatcctcccactaagggtagtgcttttcagacaaagataccatttaatagacctcgaggacacaacttttcattgcagacaagtgctgttgttttgaaaaacactgcaggtgctacaaaggtcatagcagctcaggcacagcaagctcacgtgcaggcacctcagattggggtgtggcgaaacagattgcatttcctagaaggcccccagcgatgtggattgaagcgcaagagtgaggagttggataatcatagcagcgcaatgcagattgtcgatgaattgtccatacttcctgcaatgttgcaaaccaacatgggaaatccagtgacagttgtgacagctaccacaggatcaaaacagaattgtaccactggagaaggtgactatcagttagtacagcatgaagtcttatgctccatgaaaaatacttacgaagtccttgattttcttggtcgaggcacgtttggccaggtagttaaatgctggaaaagagggacaaatgaaattgtagcaatcaaaattttgaagaatcatccttcttatgcccgtcaaggtcaaatagaagtgagcatattagcaaggctcagtactgaaaatgctgatgaatataactttgtacgagcttatgaatgctttcagcaccgtaaccatacttgtttagtctttgagatgctggaacaaaacttgtatgactttctgaaacaaaataaatttagtcccctgccactaaaagtgattcggcccattcttcaacaagtggccactgcactgaaaaaattgaaaagtcttggtttaattcatgctgatctcaagccagagaatattatgttggtggatcctgttcggcagccttacagggttaaagtaatagactttgggtcggccagtcatgtatcaaagactgtttgttcaacatatctacaatctcggtactacagagctccagagattatattggggttgccattttgtgaagccatagacatgtggtcattgggatgtgtgattgcagaattatttcttggatggccgctctacccaggagccttggagtatgatcagattcgatacatttctcagactcaaggtttgccaggagaacagttgttaaatgtgggtactaaatccacaagatttttttgcaaagaaacagatatgtctcattctggttggagattaaagacattggaagagcatgaggcagagacaggaatgaagtctaaagaagccagaaaatacattttcaacagtctggatgatgtagcgcatgtgaacacagtgatggatttggaaggaagtgatcttttggctgagaaagctgatagaagagaatttgttagtctgttgaagaaaatgttgctgattgatgcagatttaagaattactccagctgagaccctgaaccatccttttgttaatatgaaacatcttctagatttccctcatagcaaccatgtaaagtcctgttttcatattatggatatttgtaagtcccacctaaattcatgtgacacaaataatcacaacaaaacttcacttttaagaccagttgcttcaagcagtactgctacactgactgcaaattttactaaaatcggaacattaagaagtcaggcattgaccacatctgctcattcagttgtgcaccatggaatacctctgcaggcaggaactgctcagtttggttgtggtgatgcttttcagcagacattgattatctgtcccccagctattcaaggtattcctgcaacacatggtaaacccaccagttattcaataagggtagataatacagttccacttgtaactcaggccccagctgtgcagccactacagatccgaccaggagttctttctcagacgtggtctggtagaacacagcagatgctggtgcctgcctggcaacaggtgacacccctggctcctgctactactacactaacttctgagagtgtggctggttcacacaggcttggagactgggggaagatgatttcatgcagcaatcattataactcagtgatgccgcagcctcttctgaccaatcagataactttatctgcccctcagccagttagtgtggggattgcacatgttgtctggcctcagcctgccactaccaagaaaaataaacagtgccagaacagaggtattttggtaaaactaatggaatgggagccaggaagagaggaaataaatgctttcagttggagtaattcattacagaataccaatatcccacattcagcatttatttctccaaagataattaatgggaaagatgtcgaggaagtaagttgtatagaaacacaggacaatcagaactcagaaggagaggcaagaaattgctgtgaaacatctatcagacaggactctgattcatcagtttcagacaaacagcggcaaaccatcattattgccgactccccgagtcctgcagtgagtgtcatcactatcagcagtgacactgatgaggaagagacttcccagagacattcactcagagaatgtaaaggtagtctagattgtgaagcttgccagagcactttgaatattgatcggatgtgttcattaagtagtcctgatagtactctgagtaccagctcctcagggcagtccagcccatccccctgcaagagaccgaatagtatgtcagatgaagagcaagaaagtagttgtgatacggtggatggctctccgacatctgactcttccgggcatgacagtccatttgcagagagcacttttgtggaggacactcatgaaaacacagaattggtatcctctgctgacacagaaaccaagccagctgtctgttctgttgtggtgccaccagtggaactagaaaatggcttaaatgccgatgagcatatggcaaacacagattctatatgccagccattaataaaaggacgatctgcccctggaagattaaaccagccttctgcagtgggtactcgtcagcaaaaattgacatcagcattccagcagcagcatttgaacttcagtcaggttcagcactttggatctgggcatcaagagtggaatggaaactttgggcacagaagacagcaagcttatattcctactagtgttaccagtaatccattcactctttctcatggaagtcccaatcacacagcagtgcatgcccacctggctggaaatacacacctcggaggacagcctactctacttccatacccatcatcagccaccctcagtagtgctgcaccagtggcccacctgttagcctctccgtgtacctcaagacctatgttacagcatccaacttataatatctcccatcccagtggcatagttcaccaagtcccagtgggcttaaatccccgtctgttaccatccccaaccattcatcagactcagtacaaaccaatcttcccaccacattcttacattgcagcatcacctgcatatactggatttccactgagtccaacaaaactcagccagtatccatatatgtga

SEQ ID NO: 500 - DNA, 462 bp, Artificial Sequence
  Description of Artificial sequences:primer
  misc_feature (1)..(462): 3' terminal sequence from clone image:257170. nitrilase 1(NIT1) gene.
  misc_feature (357)..(357): n is a, c, g, or t
  misc_feature (440)..(440): n is a, c, g, or t
atttttaaagtgtaatttattcatataatggaatactctaaacaatttttttaaaaagacaacaaaaaacaagctactgatacactctcaaaatagatgaacgaaagaagtgagatacaaatgagcacgtgctgtgtgactgtataaatgcatttaaattaaattcaaggatgggtgtggtggctcacgtctgtaatcctagcactttgggaggccagggaggggagggatcacctgaggtcaggagttcgagacgagcctagccaacatggggataccccgtctctactaaaaatacaaaaattaggcaggcttggtggcgtgtgcctgtaatcccagctacttgggaggctgatncaggagaatcgctttaatccaggaggcagaggtttcagtgagctgagatcatgccactgcactccagcctcggtgacagggcnagactccatctccaaaacagaa

SEQ ID NO: 501 - DNA, 596 bp, Artificial Sequence
  Description of Artificial sequences:primer
  misc_feature (1)..(596): 5' terminal sequence from clone image:257170. nitrilase 1(NIT1) gene.
  misc_feature (5)..(5): n is a, c, g, or t
  misc_feature (8)..(9): n is a, c, g, or t
  misc_feature (15)..(15): n is a, c, g, or t
  misc_feature (124)..(124): n is a, c, g, or t
  misc_feature (449)..(449): n is a, c, g, or t
  misc_feature (544)..(544): n is a, c, g, or t
  misc_feature (561)..(561): n is a, c, g, or t
  misc_feature (569)..(569): n is a, c, g, or t
  misc_feature (574)..(574): n is a, c, g, or t
  misc_feature (587)..(587): n is a, c, g, or t
gatcnaanngtctgntatgacatgcggttccctgaactctctctggcattggctcaagctggagcagagatacttacctatccttcagcttttggatccattacaggcccagcccactgggagngtgttgctgcgggcccgtgctatcgaaacccagtgctatgtagtggcagcagcacagtgtggacgccaccatgagaagagagcaagttatggccacagcatggtggtagacccctggggaacagtggtggcccgctgctctgaggggccaggcctctgccttgcccgaatagacctcaactatctgcgacagttgcgccgacacctgcctgtgttccagcaccgcagccctgacctctatggcaatctgggtcaaccactgtcttaagacttgacttctgtgagtttagaactgcccctcccacccccaacctgccaatatgagntagtgctcatgtgacttggaaggcagggatcaggcaacaggtcccctcactttggagaaaccttgactctcttgatggaacacagatgggcttgnttgggaaagaaactttnacctgagntttanctgaggttagaantggagtttg

SEQ ID NO: 502 - DNA, 1385 bp, Artificial Sequence
  Description of Artificial sequences:primer
  misc_feature (1)..(1385): nitrilase 1(NIT1) gene.
gcccactcgctgcggcctatctggctccagaccgccctccggatcggaccctgcgaatggttttggctatatcttcatgctgggcttcatcaccaggcctcctcacagattcctgtcccttctgtgtcctggactccggatacctcaactctcagtactttgtgctcagcccaggcccagagccatggctatctcctcttcctcctgcgaactgcccctggtggctgtgtgccaggtaacatcgacgccagacaagcaacagaactttaaaacatgtgctgagctggttcgagaggctgccagactgggtgcctgcctggctttcctgcctgaggcatttgacttcattgcacgggaccctgcagagacgctacacctgtctgaaccactgggtgggaaacttttggaagaatacacccagcttgccagggaatgtggactctggctgtccttgggtggtttccatgagcgtggccaagactgggagcagactcagaaaatctacaattgtcacgtgctgctgaacagcaaaggggcagtagtggccacttacaggaagacacatctgtgtgacgtagagattccagggcaggggcctatgtgtgaaagcaactctaccatgcctgggcccagtcttgagtcacctgtcagcacaccagcaggcaagattggtctagctgtctgctatgacatgcggttccctgaactctctctggcattggctcaagctggagcagagatacttacctatccttcagcttttggatccattacaggcccagcccactgggaggtgttgctgcgggcccgtgctatcgaaacccagtgctatgtagtggcagcagcacagtgtggacgccaccatgagaagagagcaagttatggccacagcatggtggtagacccctggggaacagtggtggcccgctgctctgaggggccaggcctctgccttgcccgaatagacctcaactatctgcgacagttgcgccgacacctgcctgtgttccagcaccgcaggcctgacctctatggcaatctgggtcacccactgtcttaagacttgacttctgtgagtttagacctgcccctcccacccccaccctgccactatgagctagtgctcatgtgacttggaggcaggatccaggcacagctcccctcacttggagaaccttgactctcttgatggaacacagatgggctgcttgggaaagaaactttcacctgagcttcacctgaggtcagactgcagtttcagaaaggtggaattttatatagtcattgtttatttcatggaaactgaagttctgctgagggctgagcagcactggcattgaaaaatataataatcataaagtcaaaaaaaaaaaaaaaaaaaaaaa

SEQ ID NO: 503 - DNA, 337 bp, Artificial Sequence
  Description of Artificial sequences:primer
  misc_feature (1)..(337): 3' terminal sequence from clone image:257284. ribosomal protein l39(RPL39) gene.
  misc_feature (64)..(64): n is a, c, g, or t
tttttttttttttttaaaaagaaaggccttacatatttattactgaatccagccaaccaacgtnttcataacagattcagagaggaaaacacgtcgaaatctccagatagtggtgacattttcagcttgatatggtaacatgatcgtgaccttcagacagcataaatatgtgtgccatctcatgtgcaattccttatagacccagcttggttcttctccaatgtctccttttggagttgtacctgattttatttccagttttcatccgaatccactggggaatgggacgattttgcttttgtttcttggccaggaatcgcttaatcctgaaagtctt

SEQ ID NO: 504 - DNA, 401 bp, Artificial Sequence
  Description of Artificial sequences:primer
  misc_feature (1)..(401): ribosomal protein l39(RPL39) gene.
cttccgccagcttccctcctcttcctttctccgccatcgtggtgtgttcttgactccgctgctcgccatgtcttctcacaagactttcaggattaagcgattcctggccaagaaacaaaagcaaaatcgtcccattccccagtggattcggatgaaaactggaaataaaatcaggtacaactccaaaaggagacattggagaagaaccaagctgggtctataaggaattgcacatgagatggcacacatatttatgctgtctgaaggtcacgatcatgttaccatatcaagctgaaaatgtcaccactatctggagatttcgacgtgttttcctctctgaatctgttatgaacacgttggttggctggattcagtaataaatatgtaaggcctttcttttt

SEQ ID NO: 505 - DNA, 321 bp, Artificial Sequence
  Description of Artificial sequences:primer
  misc_feature (1)..(321): 3' terminal sequence from clone image:257445. ubiquitin carboxyl-terminal esterase l3 (ubiquitin thiolesterase)(UCHL3) gene.
  misc_feature (1)..(1): n is a, c, g, or t
  misc_feature (115)..(115): n is a, c, g, or t
nttttttttttttttttaactcacataaagtttaatcatcaagttaatgaaaatatcaaaatttttgagttagtgtatggcagagaaaatttagttgcaaataatacagtttttngtgtttccattattgacaagctatgctgcagaaagagcaatcgcattaaatcttagttcatcagggtcgcgctccataaacttcttgcaaacttctatggcatcctctaataaagtttcatcactagtttcaccatggttaattggaaatggcttccgcccatctaattcatagagatgcccatctacatgaactaattgcaataa

SEQ ID NO: 506 - DNA, 365 bp, Artificial Sequence
  Description of Artificial sequences:primer
  misc_feature (1)..(365): 5' terminal sequence from clone image:257445. ubiquitin carboxyl-terminal esterase l3 (ubiquitin thiolesterase)(UCHL3) gene.
  misc_feature (40)..(40): n is a, c, g, or t
  misc_feature (361)..(361): n is a, c, g, or t
accacagccatggagggtcaacgctggctgccgctggagncaatcccgaggtcaccaaccagtttcttaaacaattaggtctacatcctaactggcaattcgttgatgtatatggaatggatcctgaactccttagcatggtaccaagaccagtctgtgcagtcttacttctctttcctattacagaaaagtatgaagtattcagaacagaagaggaagaaaaaataaaatctcagggacaagatgttacatcatcagtatatttcatgaagcaaacaatcagcaatgcctgtggaacaattggactgattcatgctattgcaaacaataaagacaagatgcactttgaatctggatcaancttg

SEQ ID NO: 507 - DNA, 911 bp, Artificial Sequence
  Description of Artificial sequences:primer
  misc_feature (1)..(911): ubiquitin carboxyl-terminal esterase l3 (ubiquitin thiolesterase)(UCHL3) gene.
cccacgcgtccggtcagagctggagggccgggcaccgcggccatggagggtcaacgctggctgccgctggaggccaatcccgaggtcaccaaccagtttcttaaacaattaggtctacatcctaactggcaattcgttgatgtatatggaatggatcctgaactccttagcatggtaccaagaccagtctgtgcagtcttacttctctttcctattacagaaaagtatgaagtattcagaacagaagaggaagaaaaaataaaatctcagggacaagatgttacatcatcagtatatttcatgaagcaaacaatcagcaatgcctgtggaacaattggactgattcatgctattgcaaacaataaagacaagatgcactttgaatctggatcaaccttgaaaaaattcctggaggaatctgtgtcaatgagccctgaagaacgagccagatacctggagaactatgatgccatccgagttactcatgagaccagtgcccatgaaggtcagactgaggcaccaagtatagatgagaaagtagatcttcattttattgcattagttcatgtagatgggcatctctatgaattagatgggcggaagccatttccaattaaccatggtgaaactagtgatgaaactttattagaggatgccatagaagtttgcaagaagtttatggagcgcgaccctgatgaactaagatttaatgcgattgctctttctgcagcatagcttgtcaataatggaaacaccaaaaactgtattatttgcaactaaattttctctgccatacactaactcaaaaattttgatattttcattaacttgatgattaaactttatgtgagttaaaaaaaaaaaaaaaaaaaaaaaaaaaaaaaaaaaaaaaaaaaaaaaaaaaaaaaaaa

SEQ ID NO: 508 - DNA, 433 bp, Artificial Sequence
  Description of Artificial sequences:primer
  misc_feature (1)..(433): 3' terminal sequence from clone image:257519. max dimerization protein 1(MAD) gene.
  misc_feature (365)..(365): n is a, c, g, or t
gtcaaataattactgttttatattgggacagtacatttcagatttcaaccaaaagacaaaaatgcagtttaactcaaaggcacaacaattgaaacacagaaaataatggcatctcttggatgcttatttctaaattaaacaaagaagtacacaaattttgttcccttccctcccccagtgcaagcccacaagctttttccaaagtcttgagcttttgatgctgtcccgcattgtggacttgtgaggcgcttggatgtagcaatgaaacaaaatgcttgagaggtctagtgaatggcattcaaaagggacctcaaagtgcagacatatctttttcaaatatgttacaggctgaactggctctttgnacactatcactctgcttaaatccaggaagcaggctttaaaaatgcaaaaggcatacaagttgtatttt

SEQ ID NO: 509 - DNA, 1002 bp, Artificial Sequence
  Description of Artificial sequences:primer
  misc_feature (1)..(1002): max dimerization protein 1(MAD) gene.
cgccagagaggctccctcagccctgctccgcggggtccacagcgggctccacagcgggctccatagcgggctccacagcggtccggcggcggcagcgagcccgtgggcagtgggggttggtcccgtggctccggcccccggtgcagaatggcggcggcggttcggatgaacatccagatgctgctggaggcggccgactatctggagcggcgggagagagaagctgaacatggttatgcctccatgttaccatacaataacaaggacagagatgccttaaaacggaggaacaaatccaaaaagaataacagcagtagcagatcaactcacaatgaaatggagaagaatagacgggctcatcttcgcttgtgcctggagaagttgaaggggctggtgccactgggacccgaatcaagtcgacacactacgttgagtttattaacaaaagccaaattgcacataaagaaacttgaagattgtgacagaaaagccgttcaccaaatcgaccagcttcagcgagagcagcgacacctgaagaggcagctggagaagctgggcattgagaggatccggatggacagcatcggctccaccgtctcctcggagcgctccgactccgacagggaagaaatcgacgttgacgtggagagcacggactatctcacaggtgatctggactggagcagcagcagtgtgagcgactctgacgagcggggcagcatgcagagcctcggcagtgatgagggctattccagcaccagcatcaagagaataaagctgcaggacagtcacaaggcgtgtcttggtctctaagagagtgggcactgcggctgtctccttgaaggttctccctgttggttctgattaggtaacgtattggacctgcccacaactcccttgcacgtaaacttcagtgtcccaccttgaccaaaatcagctttgtaactgttttcaaggaggtgcttaggattgtgggtttctgattgcatcactagcttctcc

SEQ ID NO: 510 - DNA, 456 bp, Artificial Sequence
  Description of Artificial sequences:primer
  misc_feature (1)..(456): 3' terminal sequence from clone image:257708. dual specificity phosphatase 1(DUSP1) gene.
  misc_feature (15)..(15): n is a, c, g, or t
  misc_feature (55)..(55): n is a, c, g, or t
  misc_feature (69)..(69): n is a, c, g, or t
  misc_feature (72)..(72): n is a, c, g, or t
  misc_feature (77)..(77): n is a, c, g, or t
  misc_feature (121)..(121): n is a, c, g, or t
  misc_feature (267)..(267): n is a, c, g, or t
  misc_feature (350)..(350): n is a, c, g, or t
  misc_feature (381)..(381): n is a, c, g, or t
  misc_feature (417)..(417): n is a, c, g, or t
  misc_feature (448)..(448): n is a, c, g, or t
gcgaccgcctgctgncgccgcctaccacgccgtgtcgttgctggacgagcgccgnagccctggacgccnaangcgancggcaccctggccctggcggcggcgcgctctgccggagcgcgcncagcaagctcttcttcctcaaaggaggatacgaagcgttttcggcttcctgcccggagctgtgcagcaaacagtcgaccccatgcggctcaagcttcccctgagtactagcgtcctgacagcgcggaatctgggtgcagttcctgnagtaaccccactctacgatcagggtggcccggtggaaatcctgccctttctgtacctgggcagtgcgtatcacggtttcccgnaacgacatgctggatgccttggggataactngcttgattaacgtctcagcaattgtccaacaatttngaagggtcataacagtacaagagatcctgtngaagacaa

SEQ ID NO: 511 - DNA, 2015 bp, Artificial Sequence
  Description of Artificial sequences:primer
  misc_feature (1)..(2015): dual specificity phosphatase 1(DUSP1) gene.
tcgctgcgaaggacatttgggctgtgtgtgcgacgcgggtcggaggggcagtcgggggaaccgcgaagaagccgaggagcccggagccccgcgtgacgctcctctctcagtccaaaagcggcttttggttcggcgcagagagacccgggggtctagcttttcctcgaaaagcgccgccctgcccttggccccgagaacagacaaagagcaccgcagggccgatcacgctgggggcgctgaggccggccatggtcatggaagtgggcaccctggacgctggaggcctgcgggcgctgctgggggagcgagcggcgcaatgcctgctgctggactgccgctccttcttcgctttcaacgccggccacatcgccggctctgtcaacgtgcgcttcagcaccatcgtgcggcgccgggccaagggcgccatgggcctggagcacatcgtgcccaacgccgagctccgcggccgcctgctggccggcgcctaccacgccgtggtgttgctggacgagcgcagcgccgccctggacggcgccaagcgcgacggcaccctggccctggcggccggcgcgctctgccgcgaggcgcgcgccgcgcaagtcttcttcctcaaaggaggatacgaagcgttttcggcttcctgcccggagctgtgcagcaaacagtcgacccccatggggctcagccttcccctgagtactagcgtccctgacagcgcggaatctgggtgcagttcctgcagtaccccactctacgatcagggtggcccggtggaaatcctgccctttctgtacctgggcagtgcgtatcacgcttcccgcaaggacatgctggatgccttgggcataactgccttgatcaacgtctcagccaattgtcccaaccattttgagggtcactaccagtacaagagcatccctgtggaggacaaccacaaggcagacatcagctcctggttcaacgaggccattgacttcatagactccatcaagaatgctggaggaagggtgtttgtccactgccaggcaggcatttcccggtcagccaccatctgccttgcttaccttatgaggactaatcgagtcaagctggacgaggcctttgagtttgtgaagcagaggcgaagcatcatctctcccaacttcagcttcatgggccagctgctgcagtttgagtcccaggtgctggctccgcactgttcggcagaggctgggagccccgccatggctgtgctcgaccgaggcacctccaccaccaccgtgttcaacttccccgtctccatccctgtccactccacgaacagtgcgctgagctaccttcagagccccattacgacctctcccagctgctgaaaggccacgggaggtgaggctcttcacatcccattgggactccatgctccttgagaggagaaatgcaataactctgggaggggctcgagagggctggtccttatttatttaacttcacccgagttcctctgggtttctaagcagttatggtgatgacttagcgtcaagacatttgctgaactcagcacattcgggaccaatatatagtgggtacatcaagtccatctgacaaaatggggcagaagagaaaggactcagtgtgtgatccggtttctttttgctcgcccctgttttttgtagaatctcttcatgcttgacatacctaccagtattattcccgacgacacatatacatatgagaatataccttatttatttttgtgtaggtgtctgccttcacaaatgtcattgtctactcctagaagaaccaaatacctcaatttttgtttttgagtactgtactatcctgtaaatatatcttaagcaggtttgttttcagcactgatggaaaataccagtgttgggtttttttttagttgccaacagttgtatgtttgctgattatttatgacctgaaataatatatttcttcttctaagaagacattttgttacataaggatgacttttttatacaatggaataaattatggcatttctattg

SEQ ID NO: 512 - DNA, 504 bp, Artificial Sequence
  Description of Artificial sequences:primer
  misc_feature (1)..(504): 3' terminal sequence from clone image:258313. cytochrome c oxidase subunit viib(COX7B) gene.
  misc_feature (303)..(303): n is a, c, g, or t
  misc_feature (425)..(425): n is a, c, g, or t
  misc_feature (443)..(443): n is a, c, g, or t
  misc_feature (448)..(448): n is a, c, g, or t
  misc_feature (485)..(485): n is a, c, g, or t
  misc_feature (490)..(490): n is a, c, g, or t
tttttttttttttgaaggtttcaaatgtactttatttcttcaataatgccatatcttaatgggtacacagtgctttaatttggcatcaattatgagctgttttttaaacaattcattattacaccagctgggatgattactgattcctccattcctttggggtaactctgccaacaggggacaggttccattctattccgacttgtgttgctacatatgtccatgtaacaatacagaaagtggctccactagctaatacagcattaccgtatttgtcatgaaaatcaggtgtacgtttctggnggctctgctttgccattgtttgctgaattcttcgaacttggagacgatttagtgcgcttttgaccaagggaaacatcgtgaaggtgaagctagaactgcggcaatacagctgctgctttggngccaattcgcttcagggnacccntggaaagtgaggctgaaaaacaaaatgggctttcagnccctncgggccgaatcttg

SEQ ID NO: 513 - DNA, 456 bp, Artificial Sequence
  Description of Artificial sequences:primer
  misc_feature (1)..(456): cytochrome c oxidase subunit viib(COX7B) gene.
ttttgtttttcagctcacttcaagggtacctgaagcgaattggcaccaaagcagcagctgtattgccgcagttctagcttcaccttcacgatgtttcccttggtcaaaagcgcactaaatcgtctccaagttcgaagcattcagcaaacaatggcaaggcagagccaccagaaacgtacacctgattttcatgacaaatacggtaatgctgtattagctagtggagccactttctgtattgttacatggacatatgtagcaacacaagtcggaatagaatggaacctgtcccctgttggcagagttaccccaaaggaatggaggaatcagtaatcatcccagctggtgtaataatgaattgtttaaaaaacagctcataattgatgccaaattaaagcactgtgtacccattaagatatggcattattgaagaaataaagtacatttgaaaccttc

SEQ ID NO: 514 - DNA, 432 bp, Artificial Sequence
  Description of Artificial sequences:primer
  misc_feature (1)..(432): 3' terminal sequence from clone image:25831. keratin 6b(KRT6B) gene.
  misc_feature (46)..(46): n is a, c, g, or t
  misc_feature (55)..(55): n is a, c, g, or t
  misc_feature (57)..(57): n is a, c, g, or t
  misc_feature (63)..(63): n is a, c, g, or t
  misc_feature (65)..(65): n is a, c, g, or t
  misc_feature (77)..(77): n is a, c, g, or t
  misc_feature (121)..(121): n is a, c, g, or t
  misc_feature (328)..(328): n is a, c, g, or t
  misc_feature (339)..(339): n is a, c, g, or t
  misc_feature (412)..(412): n is a, c, g, or t
tttttttttcacattctcaatatgctttattcaacagaacaaaagnttggcaaangngtgcananaaagcagtgcanggaatgcacgactgcatcacgaaggtacatcacttgccattcangggacactgcaagagaacgatcaggacaactgacttgtcagatagagaactcctgagtgtagctataatgggcaggatggttagcaattaaagagaggactcctcatctgcagctggacctagactgagtttcagttcttatgggggatataggtcattttcttctcagaattatggcagactcagataccctgtaataatacgggnactaaaaaggncattcgcatgtctgagtgctgatacctgttgctttatgggtagcacaggagctcagtgggacaggtatttatnaggaggaagtagggctccca

SEQ ID NO: 515 - DNA, 369 bp, Artificial Sequence
  Description of Artificial sequences:primer
  misc_feature (1)..(369): 5' terminal sequence from clone image:25831. keratin 6b(KRT6B) gene.
cttcctgagagccttgtatgatgcagagtgtcccagatgcagacccacatctcagacacatccgtggtgctatccatggacaacaaccgcaacctggacctggacagcatcatcgctgaggtcaaggcccaatatgaggagattgctcagaggagcagggctgaggctgagtcctggtaccagacaaagtacgaggagctgcaggtcacagcaggcagacatggggacgacctgcgcaacaccaagcaggagattgctgagatcaaccgcatgatccagaggcttgagatcttgagattcgaccacgttcaagaagcagtgttgccaacctacaggcttccctttgttgattgttgagcagcgttgggg

SEQ ID NO: 516 - DNA, 2218 bp, Artificial Sequence
  Description of Artificial sequences:primer
  misc_feature (1)..(2218): keratin 6b(KRT6B) gene.
catggccagcacatccaccaccatcaggagccacagcagcagccgccggggtttcagtgccagctcagccaggctccctggggtcagccgctctggcttcagcagcatctccgtgtcccgctccaggggcagtggtggcctgggtggcgcatgtggaggagctggctttggcagccgcagtctgtatggcctggggggctccaagaggatctccattggagggggcagctgtgccatcagtggcggctatggcagcagagccggaggcagctatggctttggtggcgccgggagtggatttggtttcggtggtggagccggcattggctttggtctgggtggtggagccggccttgctggtggctttgggggccctggcttccctgtgtgcccccctggaggcatccaagaggtcactgtcaaccagagtctcctgactcccctcaacctgcaaattgaccccgccatccagcgggtgcgggccgaggagcgtgagcagatcaagaccctcaacaacaagtttgcctccttcatcgacaaggtgcggttcctagagcagcagaacaaggttctggacaccaagtggaccctgctgcaggagcagggcaccaagactgtgaggcagaacctggagccgttgttcgagcagtacatcaacaacctcaggaggcagctggacagcatcgtgggggaacggggtcgtctggactcggagctgagaaacatgcaggacctggtggaggacctcaagaacaaatatgaggatgaaatcaacaagcgcacagcagcagagaatgaatttgtgactctgaagaaggatgtggatgctgcctacatgaacaaggttgaactgcaagccaaggcagacactcttacagatgagatcaacttcctgagagccttgtatgatgcagagctgtcccagatgcagacccacatctcagacacatccgtggtgctatccatggacaacaaccgcaacctggacctggacagcatcatcgctgaggtcaaggcccaatatgaggagattgctcagaggagcagggctgaggctgagtcctggtaccagacaaagtacgaggagctgcaggtcacagcaggcagacatggggacgacctgcgcaacaccaagcaggagattgctgagatcaaccgcatgatccagaggctgagatctgagatcgaccacgtcaagaagcagtgtgccaacctacaggctgccattgctgatgctgagcagcgtggggagatggccctcaaggatgctaagaacaagctggaagggctggaggatgccctgcagaaggccaagcaggacctggcccggctgctgaaggagtaccaggagctgatgaacgtcaagctggccctggacgtggagatcgccacctaccgcaagctgctggagggcgaggagtgcaggctgaatggcgaaggcgttggacaagtcaacatctctgtagtgcagtccaccgtctccagtggctatggcggtgccagcggtgtcggcagtggcttaggcctgggtggaggaagcagctactcctatggcagtggtcttggcgttggaggcggctttagttccagcagcggcagagccactgggggtggcctcagctctgttggaggcggcagttccaccatcaagtacaccaccacctcctcctccagcaggaagagctacaagcactgaagtcgtgccgccagctctcagtcccacagctctcaggcccctctctggcagcagagccctctcctcaggttgcttgtcctcccctggcctccagtctcccctgccctcccgggtagagctgggatgccctcacttttcttctcatcaatacctgttccactgagctcctgttgcttaccatcaagtcaacagttatcagcactcagacatgcgaatgtcctttttagttcccgtattattacaggtatctgagtctgccataattctgagaagaaaaatgacctatatccccataagaactgaaactcagtctaggtccagctgcagatgaggagtcctctctttaattgctaaccatcctgcccattatagctacactcaggagttctcatctgacaagtcagttgtcctgatcttctcttgcagtgtccctgaatggcaagtgatgtaccttctgatgcagtctgcattcctgcactgctttctctgctctctttgccttcttttgttctgttgaataaa

SEQ ID NO: 517 - DNA, 438 bp, Artificial Sequence
  Description of Artificial sequences:primer
  misc_feature (1)..(438): 3' terminal sequence from clone image:258870. cytochrome p450, family 19, subfamily a, polypeptide 1(CYP19A1) gene.
tgtttttaagatgtattatttatttgataaattcttaccaataacagtctggatttcctttattattgcctcttcaacattagggtgctttgcaatgagaaatagcatgaagaacaaagagacagacatggtgtcaggagctgcgatcagcatttccaatatgcactggttcacattctctcttgtcaggtcaccacgtttctctgctaaaatcaactcagtggcaaagtccatacattcttccagtttctcttctgtggaaatcctgcgtcttttttctgctatcagaacttctatggcatctttcaaatccttgacagacttctcatactttttgtatagccaagaaatcttaaagaagatgtctggtttgatgaggagagcttgccatgcatcaaaataaccttggattttaaccacgatagcactttcgtccag

SEQ ID NO: 518 - DNA, 431 bp, Artificial Sequence
  Description of Artificial sequences:primer
  misc_feature (1)..(431): 5' terminal sequence from clone image:258870. cytochrome p450, family 19, subfamily a, polypeptide 1(CYP19A1) gene.
  misc_feature (393)..(393): n is a, c, g, or t
gcaaacttgggctgcagtgcatcggtatgcatgagaaaggcatcatatttaacaacaatccagagctctggaaaacaactcgacccttctttatgaaagctctgtcaggccccggcttgttcgtatggtcacagtctgtgctgaatccctcaaaacacatctggacaggttggaggaggtgaccaatgaatcgggctatgtggacgtgttgacccttctgcgtcgtgtcatgctggacacctctaacacgctcttcttgaggatccctttggacgaaagtgctatcgtggttaaaatccaaggttattttgatgcatggcaagctctcctcatcaaaccagacatcttctttaagatttcttggctatacaaaaagtatgaggaagtctgtcnaggatttggaaagatgcccatagaagttctggattagc

SEQ ID NO: 519 - DNA, 3116 bp, Artificial Sequence
  Description of Artificial sequences:primer
  misc_feature (1)..(3116): cytochrome p450, family 19, subfamily a, polypeptide 1(CYP19A1) gene.
ggagtttctggagggctgaacacgtggaggcaaacaggaaggtgaagaagaacttatcctatcaggacggaaggtcctgtgctcgggatcttccagacgtcgcgcggtgtcagaaaccctgtggtgaaattcagcctgtggattccagaaatttggagtgttcttggggggaaaaatccgcacacacaaagcaacatttggaaatccctgtggactctaaattgccccctctgaggtcaaggaacacaagatggttttggaaatgctgaacccgatacattataacatcaccagcatcgtgcctgaagccatgcctgctgccaccatgccagtcctgctcctcactggcctttttctcttggtgtggaattatgagggcacatcctcaataccaggtcctggctactgcatgggaattggacccctcatctcccacggcagattcctgtggatggggatcggcagtgcctgcaactactacaaccgggtatatggagaattcatgcgagtctggatctctggagaggaaacactcattatcagcaagtcctcaagtatgttccacataatgaagcacaatcattacagctctcgattcggcagcaaacttgggctgcagtgcatcggtatgcatgagaaaggcatcatatttaacaacaatccagagctctggaaaacaactcgacccttctttatgaaagctctgtcaggccccggccttgttcgtatggtcacagtctgtgctgaatccctcaaaacacatctggacaggttggaggaggtgaccaatgaatcgggctatgtggacgtgttgacccttctgcgtcgtgtcatgctggacacctctaacacgctcttcttgaggatccctttggacgaaagtgctatcgtggttaaaatccaaggttattttgatgcatggcaagctctcctcatcaaaccagacatcttctttaagatttcttggctatacaaaaagtatgagaagtctgtcaaggatttgaaagatgccatagaagttctgatagcagaaaaaagacgcaggatttccacagaagagaaactggaagaatgtatggactttgccactgagttgattttagcagagaaacgtggtgacctgacaagagagaatgtgaaccagtgcatattggaaatgctgatcgcagctcctgacaccatgtctgtctctttgttcttcatgctatttctcattgcaaagcaccctaatgttgaagaggcaataataaaggaaatccagactgttattggtgagagagacataaagattgatgatatacaaaaattaaaagtgatggaaaacttcatttatgagagcatgcggtaccagcctgtcgtggacttggtcatgcgcaaagccttagaagatgatgtaatcgatggctacccagtgaaaaaggggacaaacattatcctgaatattggaaggatgcacagactcgagtttttccccaaacccaatgaatttactcttgaaaattttgcaaagaatgttccttataggtactttcagccatttggctttgggccccgtggctgtgcaggaaagtacatcgccatggtgatgatgaaagccatcctcgttacacttctgagacgattccacgtgaagacattgcaaggacagtgtgttgagagcatacagaagatacacgacttgtccttgcacccagatgagactaaaaacatgctggaaatgatctttaccccaagaaactcagacaggtgtctggaacactagagaaggctggtcagtacctactctggagcatttctcatcagtagttcacatacaaatcatccatccttgccaatagtgtcatcctcacagtgaacactcagtggcccatggcattttataggcatacctcctatgggttgtcaccaagctaggtgctattggtcatctgctcctgttcacaccagagaaccaggctacaagagaaaaagcagaggccaagagtttgagggagaaatagtcggtgaagaaaccgtatccataaagacccgattccaccaaatgtgctttgagaaggataggccttcattaacaaaatgtatgtctggttccccagtagagctctactgcctcaacccaaggggatttttatgtctggggcagaaacactcaagttgattagaaagaccaggccaatgtcagggtacctggggccaaacccacctgctagtgtgaattaaagtactttaattttgttttctgtggaggtggaaaagcaacattcatagtctttggagaaatgcttagaaattcagcatttgacccttgctgtgaattaagcccaattaattcctgtttgtctacatatgatctgtctgtggcaaaagtttaatcagaggaaattctttcccagtctgtcgatttatgcctcagccacttgcctgtgctacaattcattgtgttacctgtagattcaggtaatacaaactatatataatcatcaagtaatacaaactaatttagtaatagcctgggttaagtattattagggccctgtgtctgctgtagaaaaaaaaattcacatgatgcacttcaaattcaaataaaaatccttttggcatgttcccatttttgcttagctcaattagtgtggctaaccaagagataactgtaaatgtgacattgatttgctcttactacagcttcagtgattgggggaggaaaagtcccaacccaatgggctcaaacttctaaggggtactcctctcatccccttatccttctccctcgacattttctccctctttcttcccatgaccccaaagccaagggcaacagatcagtaaagaacgtggtcagagtagaacccctgaagtattttttaatcctacctcaaaatttaacagttacctgagagatttaacattatctagttcattgaatcattgtatgtggtcatggataaattgcacaccttggaattcgctttctaaaggaaatcaaatgaatggaggaactttccaaacaccactttacttgtgttatatagccaatataactatctctactgaatgtcattgaaaaactaaaaaattaaacttatttacaaataggtaaaaaaaaaaaaaaaaaaaaa

SEQ ID NO: 520 - DNA, 408 bp, Artificial Sequence
  Description of Artificial sequences:primer
  misc_feature (1)..(408): 3' terminal sequence from clone image:260138. heparanase(HPSE) gene.
  misc_feature (390)..(390): n is a, c, g, or t
cagtgtcaggactagtatattttattttcagatgcaagcagcaactttggcatttcttatcacaaaaaaactatatgagaaagctggcaacccagtgaacttcctggccggagaggtttttccattaaaggtggcaaggtttgatcatccaccatctttagagttagaccattgagttggacagatttggaaagtaatccatgaggtcccaaaggtcttagaaggtatttatccacttgcttgttagaaaaaggatagggtaaccgcaagtacttggtgacgttatggaggtttatgggcatacagagttaaatctccttctttataccttgggattgtcagtggtttggtgcaatgaaaggtatactccgaggcttcccttcccctttngaacccttggcacggctt

SEQ ID NO: 521 - DNA, 587 bp, Artificial Sequence
  Description of Artificial sequences:primer
  misc_feature (1)..(587): 5' terminal sequence from clone image:260138. heparanase(HPSE) gene.
  misc_feature (21)..(21): n is a, c, g, or t
  misc_feature (23)..(23): n is a, c, g, or t
  misc_feature (332)..(332): n is a, c, g, or t
  misc_feature (504)..(504): n is a, c, g, or t
  misc_feature (529)..(529): n is a, c, g, or t
  misc_feature (559)..(559): n is a, c, g, or t
  misc_feature (566)..(566): n is a, c, g, or t
  misc_feature (577)..(577): n is a, c, g, or t
gttaggagaagattatattcntnttgcataaacttctaagaaagtccaccttcaaaaatgcaaaactctatggtcctgatgttggtcagcctcgaagaaagacggctaagatgctgaagagcttcctgaaggctggtggagaagtgattgattcagttacatggcatcactactatttgaatggacggactgctaccagggaagattttctaaaccctgatgtattggacatttttatttcatctgtgcaaaaagttttccaggtggttgagagcaccaggcctggcaagaaggtctggttaggagaaacaagctctgcatatggaggcggngcccttgctatccgacacctttgcagctggctttatgtggctggataaattgggcctgtcagcccggaatgggaattaggaagtggtgatgaggccaagtattcctttggagccaggaaactaccatttagtggatgaaaacttcgatcctttacctgattattggctatcnctcctggtcaagaaattggtgggcnccaaggtgttaatggcagcgtccaaggtcnaaagagnaggaactccgnggataccttc

SEQ ID NO: 522 - DNA, 3726 bp, Artificial Sequence
  Description of Artificial sequences:primer
  misc_feature (1)..(3726): heparanase(HPSE) gene.
cagcgctgctccccgggcgctcctccccgggcgctcctccccaggcctcccgggcgcttggatcccggccatctccgcacccttcaagtgggtgtgggtgatttcctggcggggggagcagccaggtgagcccaagatgctgctgcgctcgaagcctgcgctgccgccgccgctgatgctgctgctcctggggccgctgggtcccctctcccctggcgccctgccccgacctgcgcaagcacaggacgtcgtggacctggacttcttcacccaggagccgctgcacctggtgagcccctcgttcctgtccgtcaccattgacgccaacctggccacggacccgcggttcctcatcctcctgggttctccaaagcttcgtaccttggccagaggcttgtctcctgcgtacctgaggtttggtggcaccaagacagacttcctaattttcgatcccaagaaggaatcaacctttgaagagagaagttactggcaatctcaagtcaaccaggatatttgcaaatatggatccatccctcctgatgtggaggagaagttacggttggaatggccctaccaggagcaattgctactccgagaacactaccagaaaaagttcaagaacagcacctactcaagaagctctgtagatgtgctatacacttttgcaaactgctcaggactggacttgatctttggcctaaatgcgttattaagaacagcagatttgcagtggaacagttctaatgctcagttgctcctggactactgctcttccaaggggtataacatttcttgggaactaggcaatgaacctaacagtttccttaagaaggctgatattttcatcaatgggtcgcagttaggagaagattttattcaattgcataaacttctaagaaagtccaccttcaaaaatgcaaaactctatggtcctgatgttggtcagcctcgaagaaagacggctaagatgctgaagagcttcctgaaggctggtggagaagtgattgattcagttacatggcatcactactatttgaatggacggactgctaccagggaagattttctaaaccctgatgtattggacatttttatttcatctgtgcaaaaagttttccaggtggttgagagcaccaggcctggcaagaaggtctggttaggagaaacaagctctgcatatggaggcggagcgcccttgctatccgacacctttgcagctggctttatgtggctggataaattgggcctgtcagcccgaatgggaatagaagtggtgatgaggcaagtattctttggagcaggaaactaccatttagtggatgaaaacttcgatcctttacctgattattggctatctcttctgttcaagaaattggtgggcaccaaggtgttaatggcaagcgtgcaaggttcaaagagaaggaagcttcgagtataccttcattgcacaaacactgacaatccaaggtataaagaaggagatttaactctgtatgccataaacctccataatgtcaccaagtacttgcggttaccctatcctttttctaacaagcaagtggataaataccttctaagacctttgggacctcatggattactttccaaatctgtccaactcaatggtctaactctaaagatggtggatgatcaaaccttgccacctttaatggaaaaacctctccggccaggaagttcactgggcttgccagctttctcatatagtttttttgtgataagaaatgccaaagttgctgcttgcatctgaaaataaaatatactagtcctgacactgaatttttcaagtatactaagagtaaagcaactcaagttataggaaaggaagcagataccttgcaaagcaactagtgggtgcttgagagacactgggacactgtcagtgctagatttagcacagtattttgatctcgctaggtagaacactgctaataataatagctaataataccttgttccaaatactgcttagcattttgcatgttttacttttatctaaagttttgttttgttttattatttatttatttatttattttgtgacggagagagattccatctcaaaaaaacaagttattaaaaatgtatatgaatgctcctaatatggtcaggaagcaaggaagcgaaggatatattatgagttttaagaaggtgcttagctgtatatttatctttcaaaatgtattagaagattttagaattctttccttcatgtgccatctctacaggcacccatcagaaaaagcatactgccgttaccgtgaaactggttgtaaaagagaaactatctatttgcaccttaaaagacagctagattttgctgattttcttctttcggttttctttgtcagcaataatatgtgagaggacagattgttagatatgatagtataaaaaatggttaatgacaattcagaggcgaggagattctgtaaacttaaaattactataaatgaaattgatttgtcaagaggataaattttagaaaacacccaataccttataactgtctgttaatgcttgctttttctctacctttcttccttgtttcagttgggaagcttttggctgcaagtaacagaaactcctaattcaaatggcttaagcaataaggaaatgtatattcccacataactagacgttcaaacaggccaggctccagcacttcagtacgtcaccaggggatctgggttcttcccagctctctgctctgccatctttagcgctggcttcattctcagactctggtagcatgatggctgtagctgtttcatgggccccttcaaacctcatagcaaccagaggaagaaaatgagccattttttgagtctccttcatagacttgaataactctttttcagagcttctcacagcaaacctctcctcatgtctcctcatgtcttattgttcagaaatgggtaatgtggccatttcaccagtcactgccaacaacaacgaggttcctataattgtctctgagtaaccctttggaatggagagggtgttggtcagtctacaaactgaacactgcagttctgcgctttttaccagtgaaaaaatgtaattattttcccctcttaaggattaatattcttcaaatgtatgcctgttatggatatagtatctttaaaattttttattttaatagctttaggggtacacactttttgcttacaggggtgaattgtgtagtggtgaagactcggcttttaatgtacttgtcacctgagtgatgtacattgtacccaataggtaatttttcatccattaccctccttccgccctcttcccttctgagtctccaacatcccttataccactgtgtatgttcttgtgtacctacagctaagcttccacttataagtgagaacatgcagtatttggttttccattcctgagttacttcccttaggataacagcccccagttccgtccaagttgctgcaaaatacattattcttctttatggctgagtaatagtccatggtacatatataccacattttctttatccacttatcagttgatggacacttaggttaattccattcaatttcattcaatttaagtatatttgtaaggagctaaagctgaaaattaaattttagatctttcaatactcttaaattttatatgtaagtggtttttatattttcacatttgaaataaagtaatttttataaccttgaaaaaaaaaaaaaaaaaaaa

SEQ ID NO: 523 - DNA, 414 bp, Artificial Sequence
  Description of Artificial sequences:primer
  misc_feature (1)..(414): 3' terminal sequence from clone image:26029. ccctc-binding factor (zinc finger protein)(CTCF) gene.
  misc_feature (29)..(29): n is a, c, g, or t
  misc_feature (34)..(34): n is a, c, g, or t
  misc_feature (104)..(104): n is a, c, g, or t
  misc_feature (366)..(366): n is a, c, g, or t
  misc_feature (378)..(378): n is a, c, g, or t
  misc_feature (397)..(397): n is a, c, g, or t
  misc_feature (402)..(402): n is a, c, g, or t
  misc_feature (412)..(412): n is a, c, g, or t
tttttttttttttaacacttgttaatccngttantgatttattaactgtacaacagtagatcctcctccccagctttcaaccccattacatattttattacaangtctcatgttggcgtcctaaaataatgaaaaatatcacacagtacagctaagtacaaaatgcatcaacctagagtctgatagctaactgatggctctcttaaaagcaatacacagaagaaaaaagtgtttgaaatcagtaagactgaggctctctaaaaaacacatttttaaacatgtgacagttcatgtgcaaggaatcactttttggttgggttttgcttcacattatttattttttggagggccccaggggtttaattncctggccctggnggaattttcttggggcccngtttntagggggttncc

SEQ ID NO: 524 - DNA, 395 bp, Artificial Sequence
  Description of Artificial sequences:primer
  misc_feature (1)..(395): 5' terminal sequence from clone image:26029. ccctc-binding factor (zinc finger protein)(CTCF) gene.
  misc_feature (16)..(17): n is a, c, g, or t
tgatggcggcgagatnncgtcgccaggacttctctgggctgtgtttaaacggcccgcatcttaatttttctcccttctttctttttttggctttgggaaaagcatcattttaccaaacataccgagaacgaaaacttcaaggatgatgttagaaaaaaatgtgatttaactagaacttgctgtctgatgttagcaaatcatggaatgttctgagtccctgagggtttactgtgaagtgctgaggacagtgttgacaactaactcgttttcctagatggaaacggagacattgacccctccctccatgtgggtaaaccactccagaatgggccaccagggtttcccagagttctatggtcttctttcccaagagagttttttaatttgttaaatgg

SEQ ID NO: 525 - DNA, 3780 bp, Artificial Sequence
  Description of Artificial sequences:primer
  misc_feature (1)..(3780): ccctc-binding factor (zinc finger protein)(CTCF) gene.
tgtgtctgagcctgtggagcgattaaaccgtgcgcggagctgcttctttggcggcagcggcggcggcggtggccggtgcggacgcgcggagctcgccggagacgccgggtggccggagccgtggagcggcggcggagcgggcgccgcggggggtgtggcgcggagaatgattacggacctgaagccaaagaacaagatgcgctagtggacagattgctgaccaggggcttgagagctgggttctattttccctcctcaaactgactttgcagccacggagaggcaggggaaatggaaggtgatgcagtcgaagccattgtggaggagtccgaaacttttattaaaggaaaggagagaaagacttaccagagacgccgggaagggggccaggaagaagatgcctgccacttaccccagaaccagacggatgggggtgaggtggtccaggatgtcaacagcagtgtacagatggtgatgatggaacagctggaccccacccttcttcagatgaagactgaagtaatggagggcacagtggctccagaagcagaggctgctgtggacgatacccagattataactttacaggttgtaaatatggaggaacagcccataaacataggagaacttcagcttgttcaagtacctgttcctgtgactgtacctgttgctaccacttcagtagaagaacttcagggggcttatgaaaatgaagtgtctaaagagggccttgcggaaagtgaacccatgatatgccacaccctacctttgcctgaagggtttcaggtggttaaagtgggggccaatggagaggtggagacactagaacaaggggaacttccaccccaggaagatcctagttggcaaaaagacccagactatcagccaccagccaaaaaaacaaagaaaaccaaaaagagcaaactgcgttatacagaggagggcaaagatgtagatgtgtctgtctacgattttgaggaagaacagcaggagggtctgctatcagaggttaatgcggagaaagtggttggtaatatgaagcctccaaagccaacaaaaattaaaaagaaaggtgtaaagaagacattccagtgtgagctttgcagttacacgtgtccacggcgttcaaatttggatcgtcacatgaaaagccacactgatgagagaccacacaagtgccatctctgtggcagggcattcagaacagtcaccctcctgaggaatcaccttaacacacacacaggtactcgtcctcacaagtgcccagactgcgacatggcctttgtgaccagtggagaattggttcggcatcgtcgttacaaacacacccacgagaagccattcaagtgttccatgtgcgattacgccagtgtagaagtcagcaaattaaaacgtcacattcgctctcatactggagagcgtccgtttcagtgcagtttgtgcagttatgccagcagggacacatacaagctgaaaaggcacatgagaacccattcaggggaaaagccttatgaatgttatatttgtcatgctcggtttacccaaagtggtaccatgaagatgcacattttacagaagcacacagaaaatgtggccaaatttcactgtccccactgtgacacagtcatagcccgaaaaagtgatttgggtgtccacttgcgaaagcagcattcctatattgagcaaggcaagaaatgccgttactgtgatgctgtgtttcatgagcgctatgccctcatccagcatcagaagtcacacaagaatgagaagcgctttaagtgtgaccagtgtgattacgcttgtagacaggagaggcacatgatcatgcacaagcgcacccacaccggggagaagccttacgcctgcagccactgcgataagaccttccgccagaagcagcttctcgacatgcacttcaagcgctatcacgaccccaacttcgtccctgcggcttttgtctgttctaagtgtgggaaaacatttacacgtcggaataccatggcaagacatgctgataattgtgctggcccagatggcgtagagggggaaaatggaggagaaacgaagaagagtaaacgtggaagaaaaagaaagatgcgctctaagaaagaagattcctctgacagtgaaaatgctgaaccagatctggacgacaatgaggatgaggaggagcctgccgtagaaattgaacctgagccagagcctcagcctgtgaccccagccccaccacccgccaagaagcggagaggacgaccccctggcagaaccaaccagcccaaacagaaccagccaacagctatcattcaggttgaagaccagaatacaggtgcaattgagaacattatagttgaagtaaaaaaagagccagatgctgagcccgcagagggagaggaagaggaggcccagccagctgccacagatgcccccaacggagacctcacgcccgagatgatcctcagcatgatggaccggtgatggcggagccttgtgcgtcgccaggacttctctgggctgtgtttaaacggcccgcatcttaatttttctcccttctttctttttttggctttgggaaaagcatcattttaccaaacataccgagaacgaaaacttcaaggatgatgttagaaaaaaatgtgatttaactagaacttgctgtctgatgttagcaaatcatggaatgttctgagtccctgagggtttactgtgaagtgctgaggacagtgttgacaactaactcgttttcctagatggaaacggagacattgacccctccctccatgtggtaaaccactccagaatggccaccaggcttcccagagttctatggtcttcttcccaagagagtttttaattgtaaatgcatacttgggaaggacttagagttttaaactgttttttgcttttgcttttccctgactccctttgcttggagtcagctgcacaccagtagtatggcatgctacgatcaggttctgtcctgaaagctttgcctctttcttggcaaagtttctggtatggtcaagcttgtaaataactttttttacattttaatcttttccattaattaagaggttgaaaagaagtgcagtgtaagaaaacccagcattttaattacttgcaaattaagttaccacagactctgtagtgtgtaaatgttgacaaggaattggatcacaatcatgtagcagaatggcacccagaccactgcccaccagtgacggacatgcacgtggcagatcatgatttccagcccacggagccagcatttgaaccttgtataattaactttcagttatgatttcccatcgacattttctttgccctgtttgtagctgattgttgtgttttataaatcttctgttaaggcagaagggtgattatgagtggttcacagcagcccttataagctgggccagaaaatttcactaggtcagtaatttaaaccttggatcttcaaaaaataaaataatgtgaagcaaaaccaactaaaaagtgattcttgcacatgaactgtcacatgtttaaaaatgtgttttttagagagcctcagtcttactgatttcaaacacttttttcttctgtgtattgcttttaagagagccatcagttagctatcagactctaggttgatgcattttgtacttagctgtactgtgtgatatttttcattattttaggacgccaacatgagacctgtaataaaatatgtaatggggttgaaagctggggaggaggatctactgctgtacagctaataaatcataacggattaacaagtga

SEQ ID NO: 526 - DNA, 500 bp, Artificial Sequence
  Description of Artificial sequences:primer
  misc_feature (1)..(500): 3' terminal sequence from clone image:261204. high mobility group at-hook 2(HMGA2) gene.
  misc_feature (122)..(122): n is a, c, g, or t
  misc_feature (382)..(382): n is a, c, g, or t
  misc_feature (425)..(425): n is a, c, g, or t
  misc_feature (446)..(446): n is a, c, g, or t
  misc_feature (467)..(467): n is a, c, g, or t
gaaccaaccggtgagccctctcctaagagacccaggggaagacccaaaggcagcaaaaacaagagtccctctaaagcagctcaaaagaaagcagaagccactggagaaaaacggccaagagncagacctaggaaatggtggttgctaatgaagagcccgtgctggtgaaggaagcctgctgatcccggaactggccttgcgcgcaagtggtgggatgacagacacattcccttccttgaactgcactcttttcccttgcactcagaggtggcccgagagagcccgccacaacaagttgttcagaagaagcctgctcaggaggaactgaagagacatcctcacaagagtcttgccgaagaaggacttaggggggcgccaacgnttcgatttctacctccagcaagcagtttggatcttttttgaanggagaagacacttgcagtganccacttatttctggtaattgncatgggtctttccactttcatcttggggttggg

SEQ ID NO: 527 - DNA, 4111 bp, Artificial Sequence
  Description of Artificial sequences:primer
  misc_feature (1)..(4111): high mobility group at-hook 2(HMGA2) gene.
acacaccacacacactcacactcacacacactcacacacactcatccccttgaatcttggggcaggaactcagaaaacttccagcccgggcagcgcgcgcttggtgcaagactcaggagctagcagcccgtccccctccgactctccggtgccgccgctgcctgctcccgccaccctaggaggcgcggtgccacccactactctgtcctctgcctgtgctccgtgcccgaccctatcccggcggagtctccccatcctcctttgctttccgactgcccaaggcactttcaatctcaatctcttctctctctctctctctctctctgtctctctctctctctctctctctctctctctcgcagggtggggggaagaggaggaggaattctttccccgcctaacatttcaagggacacaattcactccaagtctcttccctttccaagccgcttccgaagtgctcccggtgcccgcaactcctgatcccaacccgcgagaggagcctctgcgacctcaaagcctctcttccttctccctcgcttccctcctcctcttgctacctccacctccaccgccacctccacctccggcacccacccaccgccgccgccgccaccggcagcgcctcctcctctcctcctcctcctcccctcttctctttttggcagccgctggacgtccggtgttgatggtggcagcggcggcagcctaagcaacagcagccctcgcagcccgccagctcgcgctcgccccgccggcgtccccagccctatcacctcatctcccgaaaggtgctgggcagctccggggcggtcgaggcgaagcggctgcagcggcggtagcggcggcgggaggcaggatgagcgcacgcggtgagggcgcggggcagccgtccacttcagcccagggacaacctgccgccccagcgcctcagaagagaggacgcggccgccccaggaagcagcagcaagaaccaaccggtgagccctctcctaagagacccaggggaagacccaaaggcagcaaaaacaagagtccctctaaagcagctcaaaagaaagcagaagccactggagaaaaacggccaagaggcagacctaggaaatggccacaacaagttgttcagaagaagcctgctcaggaggaaactgaagagacatcctcacaagagtctgccgaagaggactagggggcgcaacgttcgatttctacctcagcagcagttggatcttttgaagggagaagacactgcagtgaccacttattctgtattgccatggtctttccactttcatctggggtggggtggggtggggtgggggaggggggggtggggtggggagaaatcacataaccttaaaaaggactatattaatcaccttctttgtaatcccttcacagtcccaggtttagtgaaaaactgctgtaaacacaggggacacagcttaacaatgcaacttttaattactgttttcttttttcttaacctactaatagtttgttgatctgataagcaagagtgggcgggtgagaaaaaccgaattgggtttagtcaatcactgcactgcatgcaaacaagaaacgtgtcacacttgtgacgtcgggcattcatataggaagaacgcggtgtgtaacactgtgtacacctcaaataccaccccaacccactccctgtagtgaatcctctgtttagaacaccaaagataaggactagatactactttctctttttcgtataatcttgtagacacttacttgatgatttttaactttttatttctaaatgagacgaaatgctgatgtatcctttcattcagctaacaaactagaaaaggttatgttcatttttcaaaaagggaagtaagcaaacaaatattgccaactcttctatttatggatatcacacatatcagcaggagtaataaatttactcacagcacttgttttcaggacaacacttcattttcaggaaatctacttcctacagagccaaaatgccatttagcaataaataacacttgtcagcctcagagcatttaaggaaactagacaagtaaaattatcctctttgtaatttaatgaaaaggtacaacagaataatgcatgatgaactcacctaattatgaggtgggaggagcgaaatctaaatttcttttgctatagttatacatcaatttaaaaagcaaaaaaaaaaaggggggggcaatctctctctgtgtctttctctctctctctccctctccctctctcttttcatgtgtatcagtttccatgaaagacctgaataccacttacctcaaattaagcatatgtgttacttcaagtaatacgttttgacataagatggttgaccaaggtgcttttcttcggcttgagttcaccatctcttcattcaaactgcacttttagccagagatgcaatatatccccactactcaatactacctctgaatgttacaacgaatttacagtctagtacttattacatgctgctatacacaagcaatgcaagaaaaaaacttactgggtaggtgattctaatcatctgcagttctttttgtacacttaattacagttaaagaagcaatctccttactgtgtttcagcatgactatgtatttttctatgtttttttaattaaaaatttttaaaatacttgtttcagcttctctgctagatttctacattaacttgaaaattttttaaccaagtcgctcctaggttcttaaggataattttcctcaatcacactacacatcacacaagatttgactgtaatatttaaatattaccctccaagtctgtacctcaaatgaattctttaaggagatggactaattgacttgcaaagacctacctccagacttcaaaaggaatgaacttgttacttgcagcattcatttgttttttcaatgtttgaaatagttcaaactgcagctaaccctagtcaaaactatttttgtaaaagacatttgatagaaaggaacacgtttttacatacttttgcaaaataagtaaataataaataaaataaagccaaccttcaaagaacttgaagctttgtaggtgagatgcaacaagccctgcttttgcataatgcaatcaaaaatatgtgtttttaagattagttgaatataagaaaatgcttgacaaatattttcatgtattttacacaaatgtgatttttgtaatatgtctcaaccagatttattttaaacgcttcttatgtagagtttttatgcctttctctcctagtgagtgtgctgactttttaacatggtattatcaactgggccaggaggtagtttctcatgacggcttttgtcagtatggcttttagtactgaagccaaatgaaactcaaaaccatctctcttccagctgcttcagggaggtagtttcaaaggccacatacctctctgagactggcagatcgctcactgttgtgaatcaccaaaggagctatggagagaattaaaactcaacattactgttaactgtgcgttaaataagcaaataaacagtggctcataaaaataaaagtcgcattccatatctttggatgggccttttagaaacctcattggccagctcataaaatggaagcaattgctcatgttggccaaacatggtgcaccgagtgatttccatctctggtaaagttacacttttatttcctgtatgttgtacaatcaaaacacactactacctcttaagtcccagtatacctcatttttcatactgaaaaaaaaagcttgtggccaatggaacagtaagaacatcataaaatttttatatatatagtttatttttgtgggagataaattttataggactgttctttgctgttgttggtcgcagctacataagactggacatttaacttttctaccatttctgcaagttaggtatgtttgcaggagaaaagtatcaagacgtttaactgcagttgactttctccctgttcctttgagtgtcttctaactttattctttgttctttatgtagaattgctgtctatgattgtactttgaatcgcttgcttgttgaaaatatttctctagtgtattatcactgtctgttctgcacaataaacataacagcctctgtga

SEQ ID NO: 528 - DNA, 457 bp, Artificial Sequence
  Description of Artificial sequences:primer
  misc_feature (1)..(457): 3' terminal sequence from clone image:261517. cathepsin b(CTSB) gene.
caagttggagaaaccttttattggcacaggcattccttgttaacttgacagggtgaagctgtaatttttcaaaaacagtaaaagctggtttctcctaaactattttccttgtggtagtagagatcagtgggtcagaaacaactcctgaccacttggtttccttttgagccgcgtcattaggaggcaatctgtaaaactagcacaggtctcccgctgttccactggctcacccacatgattagcagagtgcacgaaaaaataaaacttctattaaagaatcatgctgagcacaacatcagagaggttgtgacattgcaaactcgatagatgcagggggcctgggagactggcgttctccaaagggctcccaacaccatctctcctctgatttctgtgacaaatgtggaagctacttgcttggaggtactgggggaactgatgggggaactttcatccg

SEQ ID NO: 529 - DNA, 2140 bp, Artificial Sequence
  Description of Artificial sequences:primer
  misc_feature (1)..(2140): cathepsin b(CTSB) gene.
gggagggtacttagggccggggctggcccaggctacggcggctgcagggctccggcaaccgctccggcaacgccaaccgctccgctgcgcgcaggctgggctgcaggctctcggctgcagcgctgggctggtgtgcagtggtgcgaccacggctcacggcagcctcagccacccagatgtaagcgatctggttcccacctcagcctcccgagtagtgtcttcaggcctatggagagcagcttgcgtgggctgggcctgcagtacctggtttgcatagatgattggcaggtggatctaggatccggcttccaacatgtggcagctctgggcctccctctgctgcctgctggtgttggccaatgcccggagcaggccctctttccatcccctgtcggatgagctggtcaactatgtcaacaaacggaataccacgtggcaggccgggcacaacttctacaacgtggacatgagctacttgaagaggctatgtggtaccttcctgggtgggcccaagccaccccagagagttatgtttaccgaggacctgaagctgcctgcaagcttcgatgcacgggaacaatggccacagtgtcccaccatcaaagagatcagagaccagggctcctgtggctcctgctgggccttcggggctgtggaagccatctctgaccggatctgcatccacaccaatgcgcacgtcagcgtggaggtgtcggcggaggacctgctcacatgctgtggcagcatgtgtggggacggctgtaatggtggctatcctgctgaagcttggaacttctggacaagaaaaggcctggtttctggtggcctctatgaatcccatgtagggtgcagaccgtactccatccctccctgtgagcaccacgtcaacggctcccggcccccatgcacgggggagggagatacccccaagtgtagcaagatctgtgagcctggctacagcccgacctacaaacaggacaagcactacggatacaattcctacagcgtctccaatagcgagaaggacatcatggccgagatctacaaaaacggccccgtggagggagctttctctgtgtattcggacttcctgctctacaagtcaggagtgtaccaacacgtcaccggagagatgatgggtggccatgccatccgcatcctgggctggggagtggagaatggcacaccctactggctggttgccaactcctggaacactgactggggtgacaatggcttctttaaaatactcagaggacaggatcactgtggaatcgaatcagaagtggtggctggaattccacgcaccgatcagtactgggaaaagatctaatctgccgtgggcctgtcgtgccagtcctgggggcgagatcggggtagaaatgcattttattctttaagttcacgtaagatacaagtttcagacagggtctgaaggactggattggccaaacatcagacctgtcttccaaggagaccaagtcctggctacatcccagcctgtggttacagtgcagacaggccatgtgagccaccgctgccagcacagagcgtccttccccctgtagactagtgccgtagggagtacctgctgccccagctgactgtggccccctccgtgatccatccatctccagggagcaagacagagacgcaggaatggaaagcggagttcctaacaggatgaaagttcccccatcagttcccccagtacctccaagcaagtagctttccacatttgtcacagaaatcagaggagagatggtgttgggagccctttggagaacgccagtctcccaggccccctgcatctatcgagtttgcaatgtcacaacctctctgatcttgtgctcagcatgattctttaatagaagttttattttttcgtgcactctgctaatcatgtgggtgagccagtggaacagcgggagacctgtgctagttttacagattgcctcctaatgacgcggctcaaaaggaaaccaagtggtcaggagttgtttctgacccactgatctctactaccacaaggaaaatagtttaggagaaaccagcttttactgtttttgaaaaattacagcttcaccctgtcaagttaacaaggaatgcctgtgccaataaaagttttctccaacttgaa

SEQ ID NO: 530 - DNA, 233 bp, Artificial Sequence
  Description of Artificial sequences:primer
  misc_feature (1)..(233): 5' terminal sequence from clone image:262425. glycerol kinase(GK) gene.
  misc_feature (225)..(225): n is a, c, g, or t
gataatctgtggactcactcagttcaccaataaatgccatattgcttttgctgcattagaagctgtttgtttccaaactcgagagattttggatgccatgaatcgagactgtggaattccactcagtcatttgcaggtagatggaggaatgaccagcaacaaaattcttatgcagctacaagcagacattctgtatataccagtagtgaagccctcaatgcccgnaaccactg

SEQ ID NO: 531 - DNA, 2068 bp, Artificial Sequence
  Description of Artificial sequences:primer
  misc_feature (1)..(2068): glycerol kinase(GK) gene.
ttgaactcctggagcccgtcacccaggaaaccggccgcaatcgccggccgacctgaagctggtttcatggcagcctcaaagaaggcagttttggggccattggtgggggcggtggaccagggcaccagttcgacgcgctttttggttttcaattcaaaaacagctgaactacttagtcatcatcaagtagaaataaaacaagagttcccaagagaaggatgggtggaacaggaccctaaggaaattctacattctgtctatgagtgtatagagaaaacatgtgagaaacttggacagctcaatattgatatttccaacataaaagctattggtgtcagcaaccagagggaaaccactgtagtctgggacaagataactggagagcctctctacaatgctgtggtgtggcttgatctaagaacccagtctaccgttgagagtcttagtaaaagaattccaggaaataataactttgtcaagtccaagacaggccttccacttagcacttacttcagtgcagtgaaacttcgttggctccttgacaatgtgagaaaagttcaaaaggccgttgaagaaaaacgagctctttttgggactattgattcatggcttatttggagtttgacaggaggagtcaatggaggtgtccactgtacagatgtaacaaatgcaagtaggactatgcttttcaacattcattctttggaatgggataaacaactctgcgaattttttggaattccaatggaaattcttccaaatgtccggagttcttctgagatctatggcctaatgaaagctggggccttggaaggtgtgccaatatctgggtgtttaggggaccagtctgctgcattggtgggacaaatgtgcttccagattggacaagccaaaaatacgtatggaacaggatgtttcttactatgtaatacaggccataagtgtgtattttctgatcatggccttctcaccacagtggcttacaaacttggcagagacaaaccagtatattatgctttggaaggttctgtagctatagctggtgctgttattcgctggctaagagacaatcttggaattataaagacctcagaagaaattgaaaaacttgctaaagaagtaggtacttcttatggctgctacttcgtcccagcattttcggggttatatgcaccttattgggagcccagcgcaagagggataatctgtggactcactcagttcaccaataaatgccatattgcttttgctgcattagaagctgtttgtttccaaactcgagagattttggatgccatgaatcgagactgtggaattccactcagtcatttgcaggtagatggaggaatgaccagcaacaaaattcttatgcagctacaagcagacattctgtatataccagtagtgaagccctcaatgcccgaaaccactgcactgggtgcggctatggcggcaggggctgcagaaggagtcggcgtatggagtctcgaacccgaggatttgtctgccgtcacgatggagcggtttgaacctcagattaatgcggaggaaagtgaaattcgttattctacatggaagaaagctgtgatgaagtcaatgggttgggttacaactcaatctccagaaagtggtattccataaaacctaccaactcatggattcccaagatgtgagctttttacataatgaaagaacccagcaattctgtctcttaatgcaatgacactattcatagactttgattttatttataagccacttgctgcatgaccctccaagtagacctgtggcttaaaataaagaaaatgcagcaaaaagaatgctatagaaatatttggtggtttttttttttttaaacatccacagttaaggttgggccagctacctttgggggtgaccccccccattgccataacatcctgctccattccctctaagatgtaggaagaattcggatccttaccattggaatcttccatcgaacatactcaaacacttttgggccaggatttgagtctctgcatgacatatacttgattaaaaggttattactaacctgttaaaaatc

SEQ ID NO: 532 - DNA, 428 bp, Artificial Sequence
  Description of Artificial sequences:primer
  misc_feature (1)..(428): 3' terminal sequence from clone image:263262. interleukin 6 signal transducer (gp130, oncostatin m receptor)(IL6ST) gene.
  misc_feature (417)..(417): n is a, c, g, or t
tcctttttgaacaggtccaatgatttcagatcttctggaaaaggctttttgtcatttgcttctatttccacaacacttacatcagtgaaattgccatctgaatacatttgatcttttgaattaaaattgtgccttggaggagtgtgaggtgaccactgggcaatatgactctttgaaggatctggaacattaggccagatgtgttttttaattaggtctcgcttattaaagcagaacagcactcccagaagagttgtcaataggaatgctaagcaaacaggcacgactatggcttcaatttctccttgagcaaactttggggtaagtaaaagtgaattcttggaccatccttcccacctttcatctgtgtatgctgccattccgtaccatggtacaatggtgtcactagtcaaaganggacaatgtat

SEQ ID NO: 533 - DNA, 3242 bp, Artificial Sequence
  Description of Artificial sequences:primer
  misc_feature (1)..(3242): interleukin 6 signal transducer (gp130, oncostatin m receptor)(IL6ST) gene.
gagcagccaaaaggcccgcggagtcgcgctgggccgccccggcgcagctgaaccgggggccgcgcctgccaggccgacgggtctggcccagcctggcgccaaggggttcgtgcgctgtggagacgcggagggtcgaggcggcgcggcctgagtgaaacccaatggaaaaagcatgacatttagaagtagaagacttagcttcaaatccctactccttcacttactaattttgtgatttggaaatatccgcgcaagatgttgacgttgcagacttggctagtgcaagccttgtttattttcctcaccactgaatctacaggtgaacttctagatccatgtggttatatcagtcctgaatctccagttgtacaacttcattctaatttcactgcagtttgtgtgctaaaggaaaaatgtatggattattttcatgtaaatgctaattacattgtctggaaaacaaaccattttactattcctaaggagcaatatactatcataaacagaacagcatccagtgtcacctttacagatatagcttcattaaatattcagctcacttgcaacattcttacattcggacagcttgaacagaatgtttatggaatcacaataatttcaggcttgcctccagaaaaacctaaaaatttgagttgcattgtgaacgaggggaagaaaatgaggtgtgagtgggatggtggaagggaaacacacttggagacaaacttcactttaaaatctgaatgggcaacacacaagtttgctgattgcaaagcaaaacgtgacacccccacctcatgcactgttgattattctactgtgtattttgtcaacattgaagtctgggtagaagcagagaatgcccttgggaaggttacatcagatcatatcaattttgatcctgtatataaagtgaagcccaatccgccacataatttatcagtgatcaactcagaggaactgtctagtatcttaaaattgacatggaccaacccaagtattaagagtgttataatactaaaatataacattcaatataggaccaaagatgcctcaacttggagccagattcctcctgaagacacagcatccacccgatcttcattcactgtccaagaccttaaaccttttacagaatatgtgtttaggattcgctgtatgaaggaagatggtaagggatactggagtgactggagtgaagaagcaagtgggatcacctatgaagatagaccatctaaagcaccaagtttctggtataaaatagatccatcccatactcaaggctacagaactgtacaactcgtgtggaagacattgcctccttttgaagccaatggaaaaatcttggattatgaagtgactctcacaagatggaaatcacatttacaaaattacacagttaatgccacaaaactgacagtaaatctcacaaatgatcgctatctagcaaccctaacagtaagaaatcttgttggcaaatcagatgcagctgttttaactatccctgcctgtgactttcaagctactcaccctgtaatggatcttaaagcattccccaaagataacatgctttgggtggaatggactactccaagggaatctgtaaagaaatatatacttgagtggtgtgtgttatcagataaagcaccctgtatcacagactggcaacaagaagatggtaccgtgcatcgcacctatttaagagggaacttagcagagagcaaatgctatttgataacagttactccagtatatgctgatggaccaggaagccctgaatccataaaggcataccttaaacaagctccaccttccaaaggacctactgttcggacaaaaaaagtagggaaaaacgaagctgtcttagagtgggaccaacttcctgttgatgttcagaatggatttatcagaaattatactatattttatagaaccatcattggaaatgaaactgctgtgaatgtggattcttcccacacagaatatacattgtcctctttgactagtgacacattgtacatggtacgaatggcagcatacacagatgaaggtgggaaggatggtccagaattcacttttactaccccaaagtttgctcaaggagaaattgaagccatagtcgtgcctgtttgcttagcattcctattgacaactcttctgggagtgctgttctgctttaataagcgagacctaattaaaaaacacatctggcctaatgttccagatccttcaaagagtcatattgcccagtggtcacctcacactcctccaaggcacaattttaattcaaaagatcaaatgtattcagatggcaatttcactgatgtaagtgttgtggaaatagaagcaaatgacaaaaagccttttccagaagatctgaaatcattggacctgttcaaaaaggaaaaaattaatactgaaggacacagcagtggtattggggggtcttcatgcatgtcatcttctaggccaagcatttctagcagtgatgaaaatgaatcttcacaaaacacttcgagcactgtccagtattctaccgtggtacacagtggctacagacaccaagttccgtcagtccaagtcttctcaagatccgagtctacccagcccttgttagattcagaggagcggccagaagatctacaattagtagatcatgtagatggcggtgatggtattttgcccaggcaacagtacttcaaacagaactgcagtcagcatgaatccagtccagatatttcacattttgaaaggtcaaagcaagtttcatcagtcaatgaggaagattttgttagacttaaacagcagatttcagatcatatttcacaatcctgtggatctgggcaaatgaaaatgtttcaggaagtttctgcagcagatgcttttggtccaggtactgagggacaagtagaaagatttgaaacagttggcatggaggctgcgactgatgaaggcatgcctaaaagttacttaccacagactgtacggcaaggcggctacatgcctcagtgaaggactagtagttcctgctacaacttcagcagtacctataaagtaaagctaaaatgattttatctgtgaattcagattttaaaaagtcttcactctctgaagatgatcatttgcccttaaggacaaaaatgaactgaagtttcacatgagctatttccattccagaatatctgggattctactttaagcactacataaactgactttatcctcagaaaaaaaaaaaaaaa

SEQ ID NO: 534 - DNA, 391 bp, Artificial Sequence
  Description of Artificial sequences:primer
  misc_feature (1)..(391): 3' terminal sequence from clone image:264183. chromosome 5 open reading frame 5(C5ORF5) gene.
  misc_feature (4)..(4): n is a, c, g, or t
aatngaggaactacaggctgatcttctgccataatctcaaacagccataaatgacaaaagaatgcttgctcagtgagggtagctggtgcagaagccattttttaaacttaggtatttaagtactgaaagaaaagacagctttgatttctggctgcaaaaaagatatgaggaagagctcctccccttccttgagtaactgcaactccgttcttgctaacaaaatatttggaattccacttgatgagctgcagcagggaggacatccagacaatgaggttccattcataagtccgccacgttgtggactatattggaggaacatggtctggagcaacaaggactttttcaagtcaatgggaatgctgagacagttggagtggcttcggcaaag

SEQ ID NO: 535 - DNA, 379 bp, Artificial Sequence
  Description of Artificial sequences:primer
  misc_feature (1)..(379): 5' terminal sequence from clone image:264183. chromosome 5 open reading frame 5(C5ORF5) gene.
acatctgtgtaaatgtggaagacatctggaccaaagacagcagccaaagaatttgcagaccaaatttcttcatgatgtgatgctacattggctaaaaatctacacagaaactttaacaaactataattaacaggtggaagctgttgcaagaggaacctcaactttcttccaaattcatcttcattattataatcttgagaaagctgcatcaagtgaatatgtaaactgccagggataacaggttcaggaagttcttgaagaaaaaatctaagaaggctaatagctgagggaacatctgcttccttaaccaaatccacctcttctccgctgtcgtatctctgccgaagccactccactggtctccagcatttccattgac

SEQ ID NO: 536 - DNA, 5470 bp, Artificial Sequence
  Description of Artificial sequences:primer
  misc_feature (1)..(5470): chromosome 5 open reading frame 5(C5ORF5) gene.
ccgcctctgtcgccactctctccccctgttccgcgtctgcgtcgccaccaccgccgggggtatccggggggtcgcttaccgggctggccccgcgccacagccgtagctttaacctccccgtcagcggccgccccaggaagaggcttctcggccgcggagccacttggggcctcagttctcgccctcttgccgtcgccgcgggtcctggagaagcggccgcggccagggaacggggcatcgcggttccaacgattaactgctgaagtactgatcgagttctgcatttcttcaatgaggaactacaggctgatcttctgccataatctcaaacagccataaatgacaaaagaatgcttgctcagtgagggtagctggtgcagaagccattttttaaacttaggtatttaagtactgaaagaaaagacagctttgatttctggctgcaaaaaagatatgaggaagagctcctccccttccttgagtaactgcaactccgttcttgctaacaaaatatttggaattccacttgatgagctgcagcagggaggacatccagacattgaggttccattcatagtccgccacgttgtggactatattgaggaacatggaggtctggagcaacaaggactttttcaagtcaatggaaatgctgagacagtggagtggcttcggcagagatacgacagcggagaagaggtggatttggttaaggaagcagatgttccctcagctattagccttcttagattttttcttcaagaacttcctgaacctgttatccctggcagtttacatattcacttgatgcagctttctcaagattataataatgaagatgaatttggaagaaagttgaggttcctcttgcaacagcttccacctgttaattatagtttgttaaagtttctgtgtagatttttagccaatgtagcatcacatcatgaagaaatttggtctgcaaattctttggctgctgtctttggtccagatgtcttccacatttacacagatgtggaagacatgaaagagcaagaaatagtgagcaggataatggctggacttctggaaaactactatgagttttttgagaatgaagaggaagatttttcatctaatgatttgagttcaattactgaacaggttaatgaactttctgaggaagaagaggaagatgaaaagctggaacatattgaagaacttccagaagagggtgcagaaaaatcaaatgacatgccagaggtggtacaattaaggatgactgaaaacatcctggaatcaaatagtgttacggcaacaagcacccatatatctcccatcagcatcctaccagcctctacagatattttagaaagaacaattagagcagctgtggaacagcacctttttgatcttcagagcagcatagatcatgatcttaagaatttacaacagcaaagtgtggtgtgtaataatgaagcagaaagtattcattgtgatggggaaggatctaataaccagattgatattgctgatgatattattaatgccagtgaaagtaacagagactgttcaaaacctgtggctagcactaatttagacaatgaagctatgcagcaagattgtgtatttgagaatgaagaaaatacccagtctgtaggtatattgttagagccatgcagtgaccgtggtgatagtgaagatggctgtcttgagagggaagaatatttgttatttgacagtgataaattgtcacacttgattctggattctagtagcaagatatgtgatttgaatgccaacactgaatcagaagtaccaggaggtcagagtgttggtgttcaaggggaagcagcgtgtgtcagtattccacatttagatctgaagaatgtttctgatggtgataaatgggaagagccatttcctgcttttaagtcttggcaggaggactctgagtctggagaagctcagctgtctccacaagctggaagaatgaatcatcaccccttggaagaggactgtcctccagtattatcacaccgcagtttagattttggtcaaagccagcgtttcctacatgatccagaaaagttggattcctcatctaaagcactgtcttttactagaattcgaagatcatcctttagttcaaaagatgaaaagagagaggacagaacaccttatcagctggtcaagaaacttcagaagaaaatcagacaatttgaggaacagtttgaaagggaaagaaatagcaagccctcctacagtgatattgctgccaatccaaaggtattaaaatggatgacagagcttacaaaactgcggaagcaaattaaagatgcaaaacacaaaaattctgatggagaatttgtacctcagacacgtccacgtagtaacacacttccaaaaagctttggctcttctctagaccatgaagatgaagagaatgaagatgaacccaaggtcattcagaaggagaaaaaaccatctaaagaagcaacccttgaacttattcttaaaagactgaaagaaaaacgtattgagaggtgtcttccagaagatatcaagaaaatgaccaaagatcatttggtagaagagaaagcttctcttcagaaaagtcttctttactatgaaagtcaacatggaaggccggtgaccaaggaagaaaggcacattgttaaacctctctatgatagatacaggcttgtaaaacaaatgctgacaagagctagcatcactcctgtccttggatctccatccaccaagcgaaggggtcagatgttacagccaatcatagaaggagaaactgcacatttttttgaagaaatcaaggaggaagaagaagatggtgttaatctgtcctctgagttaggtgatatgttgaaaactgcagtacaggtacagtcttcattagaaaactctgaatctgatgttgaagaaaatcaagaaaaactggctctggatctccgattgtcaagttctcgagcagcttctatgcctgaattattggaacaactttggaaagccagagctgaaaaaaagaaactacgcaaaacgttgcgggaatttgaagaagcattttatcaacaaaatggaaggaatgcccagaaagaggatcgtgttccagtgcttgaggagtacagagagtacaagaaaattaaagccaagcttaggcttcttgaagttcttataagcaaacaagattcttcaaaatccatataagatacgttccttgaaaattcatatcataaagtcagttgtattccttgaagctatcatcgtgtgtacttggctggtacttaaattcgttttgtcaggcactcagagaatctcattttgtacttggttgtggtgccactaaacaaaacaaatgatgggagagtaagtaggccctctcaagggagcgtaagtgatgttccatattaaccacagactgtcctctccacctttagcaaacatatggtttacttcattgttttgtactacagatacatccttttagcaaaagactggaattttatcctttcaacttcaagaactttggaaatgcaagctttttgttattaccaactttttgtttctcattactgaagaaaattggaggaaaatcttcatactgaattcttctgttgcctttttcttacagaatgactgaaaatttgaaagaaaagcctataaaagtgcacatacgcaactgtgttctctgttttcctagaaaaccaaaatcaaactgagatttcaagtcgtactatggaacacctttctgtttaattcccaaagtgacatcttctcacaggtagtatgttagtaaaattttgcaattcgctggtcacacagctcccggatgaagataacagttggtagaccaaaaggtgacctcgcttagtatattgaaaacacacaccacacatcacacacagaactgaatcataccacatgctgcctatgggacttcagttactgtttcctgagttactgtttatccgctggcaatggtgtgatttgtctggatcagatccgcgctattccccaacccacctccagataatgtgagaaaatagccatgtcagtatgtaggaactctgatggtgctcagatttgtgtgttcaatcaatgggcttaaatcagcaaaatattatgcctaaagtaaatctgttcttaacaagggctctaccactgcattttcacatgtaccttcagggggttatctttttttttttcccctcctattttaatcagcaaaatccataccaaaacaacgacaacaacgccctcttaagggaccaccctttggtcaatcataacatgctgtttaaagcagctgtttacaggatgtgtagtggtatgccccttgtcatatactcttagcatatctttttttcctttggctttgcatggcttttcttcaggtactgtctcggtatcattctgctaatcattgttacagaatggtgacttcatttgtgctaacagtacaacagcagatttgggtcaggcttaatctaagtgttaacttttttttctggtgcttttttggattgatgactgtctcactttgactatacccatgttttgcatgcaatgactcatgcatggttttcttaactagctaatattaacaatttattccatataaaaatggaattttgcaacatcctttaataaggtgagggaagcatgaacctcagacttctggcactattacatagtaagcacatgaagtagtttgataataaatagcagttctagtacttcacatttcacccgtgtgtgcaatgcctttttctggggggtggggggtgagggaaaacctggtagtgaatgtgtagttggggaataaagaaaagcactaaatcctgccctttttgtgtggtttccttttgatacaactaggttattcataatgtatacctagaaaagtgaaattgaaaataccaaaagatgtatcatttttatttgaatccatcatgcagtgtacatttcagataatttccttcagtctccagataggagtgtatccaaacatctaattttatgtgcactgtgtatcttatatgaatgttttattttttataccacatgcaaaaatgtccatatgcactatttaaatgttttaaataatatattccttctttataatgctaaatctatatgagtaccatatttttataagtcagtggtctgactggtttcattttagaattaacagctgcttcaatatgttattcaatgttaatgtttggctgtgagtagaatatgtaaaagtggcatggcagcacttatgctctgtgacagtattgtgtgtcatagttgagcagtagctggtagaattaggcagttggtgatagttttactttggtacaaataaaaactgtatatctatatacaaataatatatagatatatatgtccaccagtataatggcattgctgtgtctggcacttcattgtacagacttttataataaaagaacttgaaagttctaaaaaa

SEQ ID NO: 537 - DNA, 457 bp, Artificial Sequence
  Description of Artificial sequences:primer
  misc_feature (1)..(457): 3' terminal sequence from clone image:264186. kruppel-type zinc finger protein(LOC57209) gene.
  misc_feature (276)..(276): n is a, c, g, or t
  misc_feature (411)..(411): n is a, c, g, or t
  misc_feature (457)..(457): n is a, c, g, or t
gatcatatttataagacttctctccaatagggattttctcatgcctaatatcaaggagcaatttctcacatacattaaactcatcaggcttctttctggaacagttctttttactaataattaagcccgaaatatttttcaaattcatttcacatgagtcacatattttatagggataatttcttaaagaaacagggtctgtgcccaaattgaaagttttgcttcctctatctccattttctacacttactgttttgttgttgtggaatagaagcncccaaaaatggtcatcttcattttcctggctgctctctaacacgtcatcaactttccatttcctttctgggtggcactggcttgggaatcctttttctaatatccagggctcttctccttgctcgatcttaaagntcacttctgggtttagtaatgcaataccctactgagacaagattgn

SEQ ID NO: 538 - DNA, 573 bp, Artificial Sequence
  Description of Artificial sequences:primer
  misc_feature (1)..(573): 5' terminal sequence from clone image:264186. kruppel-type zinc finger protein(LOC57209) gene.
  misc_feature (366)..(366): n is a, c, g, or t
  misc_feature (418)..(418): n is a, c, g, or t
  misc_feature (449)..(449): n is a, c, g, or t
  misc_feature (514)..(514): n is a, c, g, or t
cgaaggggctggctagctgaccaccagggcccctgctggctctgaccgccctcctatcccaagtaattatttacatgtttcgcgttcgcttatgtattatgtgtaatcatggcacagtatcctgaagccgtcggagtctgtgtgctggtgcaaggtctgggacaaatttaagaagagagagctctccttcctccactaagagcggaaaatgaacaaatcccaggaacaagtgtcattcaaggatgtatgtgtggacttcactcaggaagagtggtatctgctggaccctgctcagaagattctatacagagatgtgatcctggaaaattatagcaatcttgtctcagtagggtattgcattactanaccagaagtgatctttaagatcggagcaagggagaagagccctgggatattngaaaaagggattccccaagcccagtgcccancccagaaaaggaaatggaaagttggatgaacgtggttagagagcagcccaggaaaatgaagatgncccatttttggggagcctcctattcccacaaccaacaaaacagtaagtggttggaaaat

SEQ ID NO: 539 - DNA, 538 bp, Artificial Sequence
  Description of Artificial sequences:primer
  misc_feature (1)..(538): 3' terminal sequence from clone image:264331. crystallin, alpha b(CRYAB) gene.
  misc_feature (315)..(315): n is a, c, g, or t
  misc_feature (491)..(491): n is a, c, g, or t
  misc_feature (508)..(508): n is a, c, g, or t
  misc_feature (526)..(526): n is a, c, g, or t
  misc_feature (535)..(535): n is a, c, g, or t
ttttttgttgctgaatgatattttattagcttgataatttgggcctgccttagcattaataagcttcagcactagtcacaagactttcattcactggtggggaaactttcttgttttaaaaaatgcaattcaagaaagggcatctatttcttgggggctgcggtgacagcaggcttctcttcacgggtgatgggaatggtgcgctcagggccagagacctgtttccttggtccattcacagtgaggaccccatcagatgacagggatgaagtaatggtgagagggtctacatcagctgggatccggtatttcctngtgggaactccctggagatgaaaccatgttcatcctggcgctcttcatgttttccatgcacctcaatcacatctcccaacaccttaactttgagttcctctggggagaagtgcttcacatccaggttgacagagaacctgtccttctccaggcgcatctctgagagtccagtgtcnaaacagctgggtgcccncagaaaggaaggtggccnaagtagaangga

SEQ ID NO: 540 - DNA, 446 bp, Artificial Sequence
  Description of Artificial sequences:primer
  misc_feature (1)..(446): 5' terminal sequence from clone image:264331. crystallin, alpha b(CRYAB) gene.
  misc_feature (227)..(227): n is a, c, g, or t
  misc_feature (439)..(439): n is a, c, g, or t
ctccatgaactgctggtgagctaggataataaaacccctgacatcaccattccagaagcttcacaagactgcatatataaggggctggctgtagctgcagctgaaggagctgaccagccagctgacccctcacactcacctagccaccatggacatcgccatccaccacccctggatccgccgccccttctttcctttccactcccccagccgcctctttgacgagntcttcggagagcacctgttggagtctgatcttttcccgacgtctacttccctgagtcccttctaccttcggccaccctccttcctgcgggcacccagctggtttgacactggactctcagagatgcgcctggagaaggacaggttctctgtcaaactggatgtgaagcactttctccccagaggaaattcaaagttaaggtggttggggagnatgtgat

SEQ ID NO: 541 - DNA, 691 bp, Artificial Sequence
  Description of Artificial sequences:primer
  misc_feature (1)..(691): crystallin, alpha b(CRYAB) gene.
gacccctcacactcacctagccaccatggacatcgccatccaccacccctggatccgccgccccttctttcctttccactcccccagccgcctctttgaccagttcttcggagagcacctgttggagtctgatcttttcccgacgtctacttccctgagtcccttctaccttcggccaccctccttcctgcgggcacccagctggtttgacactggactctcagagatgcgcctggagaaggacaggttctctgtcaacctggatgtgaagcacttctccccagaggaactcaaagttaaggtgttgggagatgtgattgaggtgcatggaaaacatgaagagcgccaggatgaacatggtttcatctccagggagttccacaggaaataccggatcccagctgatgtagaccctctcaccattacttcatccctgtcatctgatggggtcctcactgtgaatggaccaaggaaacaggtctctggccctgagcgcaccattcccatcacccgtgaagagaagcctgctgtcaccgcagcccccaagaaatagatgccctttcttgaattgcattttttaaaacaagaaagtttccccaccagtgaatgaaagtcttgtgactagtgctgaagcttattaatgctaagggcaggcccaaattatcaagctaataaaatatcattcagcaac

SEQ ID NO: 542 - DNA, 344 bp, Artificial Sequence
  Description of Artificial sequences:primer
  misc_feature (1)..(344): 3' terminal sequence from clone image:26584. hypothetical protein mgc9850(MGC9850) gene.
  misc_feature (114)..(114): n is a, c, g, or t
  misc_feature (168)..(168): n is a, c, g, or t
  misc_feature (325)..(325): n is a, c, g, or t
tttttttttttttaaataaaagagggaatttattagaagaatacagaggttcttgcagagattccaacagctgcaaggggtcaacagctagaatcacgcctttctgaaggacangagtatgctgtaaccacaaacttctaattctgggttctgcaccatcaagaaganaatatcctacaggacagttctccttgtatactgcataaaggactaagaatgtggattcatttctgcttgctttttgatccttatagtcctttatgctggcctcaaacttgtcaagctcatgaatgtctgccaacatgtgccttgacaagtttgcagncattcatgagctcatttca

SEQ ID NO: 543 - DNA, 1977 bp, Artificial Sequence
  Description of Artificial sequences:primer
  misc_feature (1)..(1977): hypothetical protein mgc9850(MGC9850) gene.
gtcctccgcgccttccgtcggtcggtccttccttcctgcttcgcctccgcgcctcgcgctatgggacagagcccccgatccgccagcaccacctgaggatccagaaaccgccccagcgatggaagaggatcaggagctggagaggaaagcaatagaagaactgcttaaggaggcaaaacgtgggaaaactagagctgaaacaatgggacccatgggttggatgaagtgtcctcttgctagcaccaataaaagatttctaattaacacaattaaaaacacattgccctctcataaagagcaagaccatgaacaaaaagagggcgataaggaaccagcgaagagccaggcccagaaagaagaaaacccgaagaaacacagaagccatccttacaagcacagcttccgcgctcgaggttccgccagttactccccgccacgaaagcggagcagccaggacaagtacgaaaagcggtccaaccggcggtgaggctggaaccagggccagccagccctgcgggcctccgtgctccttcggggtgcggtgtgcggagaaggcctgagctggcagggcaaacacctgagagtgactttgacattaggtcctttgttgtttttaaagaggctgctggccacaggcaaaaaaaatgacctagcaactcttgaggaaacaagtgcaaaggaggatgtcttggcaagtttaagctacttctgcagtgtagtagacttacatattgttgtttatcttgtttggaagtgtgtttcaaaataaacatgtctagaatttaaagttttcagagattgttaaaactggttccaattttttggtcatttctcagaaaaataaaatacttataaatcctatattttactttttgggggtattacatttaaaatttagaaatcatcagtccagtgaccatatttatgaaaagctgtagccctccaaggtctgggaatttatcgagaagctctttgatagctctgcatttgttttcccttaggtgaacaatgtaggaaatcctcaaagtggctttgaatttaatgctccacttcagttaccagaggttaaaaatgggttttgttgtttcctgtgcattctcaaactcatttattagatagaacaatctttctatatttaatttttttaatatataggtcttaagtggtgctttaaaaagaaccctcacaagttaaaaattaagagttgtttcagtgctagatcttgccagctaaagacttgtgataccactatatagtatagttgttccagaaatcttcattttaaatagaagtgtttacaatgccttttttcccccagtattggttttcaatacctgttttcatatacaattacaaacctttcaaacctgtattccttctttatactcaggaaaatgtcaccaagcaccctcctccccagttcacaaaaggaagaagatgaagattctgtctccctgttccccctccccagttttccaaagtgtctgagcatatgcctggctgtcctcagatcatcaccatgccacatccctgctccctacttcctggcagccaagaaaagccctttctacatgctagaaggaaatacatccaaaaagttagcattggagtgttagaaactagaatagacctctccgccaccgagctgctgtgtcacgccctcagcctgctagggagtgacaagcccaagtcattcttgatccaccccttctcccaccccagatcccagggactcatcctgtgactttgtaaccacactcattcctttcaaacacagaggaggaattattgcttcatctgactttattcaaatctagttatgtattggcctaaattatttgtgcaaaatttgaaatgttttttatttaaatattagaaatagcacaaagtcatggagtttttaaaaattgttataattaagtaaaaataaagctgaattgtgtcaaaaaaaaaaaaaaaaaaaaaaaaaaaaaaaaa

SEQ ID NO: 544 - DNA, 322 bp, Artificial Sequence
  Description of Artificial sequences:primer
  misc_feature (1)..(322): 3' terminal sequence from clone image:26710. chaperonin containing tcp1, subunit 4 (delta)(CCT4) gene.
  misc_feature (305)..(305): n is a, c, g, or t
  misc_feature (313)..(313): n is a, c, g, or t
tttttttttgctacatatatgtatacacttttatttgcagaaggaatccaacacagcagtcattattactgggaaaaggaattaggatgataggataaaaggaggctttcatttttcattctctttctgtaccattaacttatttttgttttaactgggcagcctcccaagccaaagtaggttcagagaggtgccacttggatcattaacttttaagacagcatatatattatatgttggtagtttttaaggccaggggagcatttatcagtgatgagcatattggggccatttttttccctcancatgtaanctcactttt

SEQ ID NO: 545 - DNA, 455 bp, Artificial Sequence
  Description of Artificial sequences:primer
  misc_feature (1)..(455): 5' terminal sequence from clone image:26710. chaperonin containing tcp1, subunit 4 (delta)(CCT4) gene.
  misc_feature (139)..(139): n is a, c, g, or t
  misc_feature (293)..(293): n is a, c, g, or t
  misc_feature (357)..(357): n is a, c, g, or t
  misc_feature (387)..(387): n is a, c, g, or t
  misc_feature (434)..(434): n is a, c, g, or t
  misc_feature (446)..(446): n is a, c, g, or t
aagatatagaagcaggagatggcaccacatcagtagtcatcattgctggctccctcttagattcttgtaccaagcttcttcagaaagggattcatccaaccatcatttctgagtcattccagaaggccctggaaaaggnattgaaatcttgactgacatgtctcgacctgtggaactgagtgacagagaaactttgttaaatagtgcaaccacttcactgaactcaaaggtggtttctcagtattcaagtctgctttctccaatgagtgtaaatgcagtgatgaaagtgattnacccagccacagccaccagtgtagatcttaggagatattaaaatagtttaaggaagcttgggtngggacaattggatgacttgtgagttgggtnggagggcttggttctcaccccaaaaagtgttcaaatttctgggcctnaaccccgagttngaaaagggc

SEQ ID NO: 546 - DNA, 1883 bp, Artificial Sequence
  Description of Artificial sequences:primer
  misc_feature (1)..(1883): chaperonin containing tcp1, subunit 4 (delta)(CCT4) gene.
atgcccgagaatgtggcaccccggagcggggcgactgccggggctgccggcggccgcgggaaaggcgcctatcaggaccgcgacaagccagcccagatccgcttcagcaacatttccgccgccaaagcggttgctgatgctattagaacaagccttggaccaaaaggaatggataaaatgattcaagatggaaaaggtgatgtaaccattacaaatgatggtgctaccattctgaaacaaatgcaagtattacatccagcagccagaatgctggtggagctgtctaaggctcaagatatagaagcaggagatggcaccacatcagtagtcatcattgctggctccctcttagattcttgtaccaagcttcttcagaaagggattcatccaaccatcatttctgagtcattccagaaggccctggaaaagggcattgaaatcttgactgacatgtctcgacctgtggaactgagtgacagagaaactttgttaaatagtgcaaccacttcactgaactcaaaggtggtttctcagtattcaagtctgctttctccaatgagtgtaaatgcagtgatgaaagtgattgacccagccacagccaccagtgtagatcttagagatattaaaatagttaagaagcttggtgggacaattgatgactgtgagttggtggaagggctggttctcacccaaaaagtgtcaaattctggcataaccagagttgaaaaggccaagattgggcttattcagttttgcttatctgctcccaaaacagacatggataatcaaatagtggtttctgactatgcccagatggaccgagtgctgcgagaagagagagcctatattttaaatttagtgaagcaaattaaaaaaacaggatgtaatgtccttctcatacagaaatctattctaagagatgctcttagtgatcttgcattacactttctgaataaaatgaagatcatggtgattaaggatattgaaagagaagacattgaattcatttgtaagacaattggaaccaagccagttgctcatattgaccaatttactgctgacatgctgggttctgctgagttagctgaggaggtcaatttaaatggttctggcaaactgctcaagattacaggctgtgccagccctggaaaaacagttacaattgttgttcgtggttctaacaaactggtgattgaagaagctgagcgctccattcatgatgccctatgtgttattcgttgtttagtgaagaagagggctcttattgcaggaggtggtgctccagaaatagagttggccctagcattaactgaatattcacgaacactgagtggtatggaatcctactgcgttcgtgcttttgcagatgctatggaggtcattccatctacactagctgaaaatgccggcctgaatcccatttctacagtaacagaactaagaaaccggcatgcccagggagaaaaaactgcaggcattaatgtccgaaagggtggtatttccaacattttggaggaactggttgtccagcctctgttggtatcagtcagtgctctgactcttgcaactgaaactgttcggagcattctgaaaatagatgatgtggtaaacactcgataatctggataactgactagcaccattatgatcaccagtattgtggctggaatggaagaagatcaccttggtgttccttgtttggaagattatttcctctgaatttctgggcttggtcttccagttggcatttgcctgaagttgtattgaaacaatttaatgaaaatattaaatatttggtttcaaaaggcagatttatcttctcccaacattctgttatttctgatacttttgaaaaactaataaaaactaataaaagaagcgta

SEQ ID NO: 547 - DNA, 474 bp, Artificial Sequence
  Description of Artificial sequences:primer
  misc_feature (1)..(474): 3' terminal sequence from clone image:267123. lipoic acid synthetase(LIAS) gene.
  misc_feature (474)..(474): n is a, c, g, or t
atttgagatggagttttgctcttgtcacccaggctggagggcaatggagcgatcttggctcactgcaacctccccctcccaggttcaagtgattctcctgccttagcctcccgagtagctgggattacaggcacccactaccacgcctgactaatttttgtgtttttagtggagacaggatttcaccatgttggccaggctggtctcgaactcctgacctcaggtgatccacccgccttggcctcctaaagtgctgggattacaggcgtgacacataatgcctggctattgacatttttttttttaagcaaagaggtggggtacatccactgcagtccaggcattctggcaccacctctgttattaactggaatcaaattttaaaaatttctgtgatcttgaaggtcttgttgaagttttagaggtcttttgtttttcttttagccactagatttttcaggaaaaattcacctn

SEQ ID NO: 548 - DNA, 379 bp, Artificial Sequence
  Description of Artificial sequences:primer
  misc_feature (1)..(379): 5' terminal sequence from clone image:267123. lipoic acid synthetase(LIAS) gene.
  misc_feature (50)..(50): n is a, c, g, or t
  misc_feature (62)..(62): n is a, c, g, or t
  misc_feature (208)..(208): n is a, c, g, or t
  misc_feature (228)..(228): n is a, c, g, or t
  misc_feature (246)..(246): n is a, c, g, or t
  misc_feature (279)..(279): n is a, c, g, or t
  misc_feature (293)..(293): n is a, c, g, or t
  misc_feature (339)..(339): n is a, c, g, or t
  misc_feature (349)..(349): n is a, c, g, or t
  misc_feature (368)..(368): n is a, c, g, or t
ctgaaacatgccaagaaggttcagcctgatgttatttctaaaacatctanaatgttgggttnaggcgagaatgatgagcaagtatatgcaacaatgaaagcacttcgtgaggcagatgtagactgcttgactttaggacaatatatgcagccaacaaggcgtcaccttaaggttgaagaatatattactcctgaaaaattcaaatacngggaaaaagtaggaaatgancttggatttcattatacngcaagtggccctttggtgcgttcttcatataangcaggtgaattttnccggaaaaatctagtggctaaagagaaacacaaagagacctctaanacttcaacanagaccttcaagatcacagnatatttttaaa

SEQ ID NO: 549 - DNA, 1296 bp, Artificial Sequence
  Description of Artificial sequences:primer
  misc_feature (1)..(1296): lipoic acid synthetase(LIAS) gene.
ggcacgaggatccctcaacccctgcactgcgctagtcctaaagaggaaatgtctctacgctgcggggatgcagcccgcaccctggggccccgggtatttgggagatatttttgcagcccagtcagaccgttaagctccttgccagataaaaaaaaggaactcctacagaatggaccagaccttcaagattttgtatctggtgatcttgcagacaggagcacctgggatgaatataaaggaaacctaaaacgccagaaaggagaaaggttaagactacctccatggctaaagacagagattcccatggggaaaaattacaataaactgaaaaatactttgcggaatttaaatctccatacagtatgtgaggaagctcgatgtcccaatattggagagtgttggggaggtggagaatatgccaccgccacagccacgatcatgttgatgggtgacacatgtacaagaggttgcagattttgttctgttaagactgcaagaaatcctcctccactggatgccagtgagccctacaatactgcaaaggcaattgcagaatggggtctggattatgttgtcctgacatctgtggatcgagatgatatgcctgatgggggagctgaacacattgcaaagaccgtatcatatttaaaggaaaggaatccaaaaatccttgtggagtgtcttactcctgattttcgaggtgatctcaaagcaatagaaaaagttgctctgtcaggattagatgtgtatgcacataatgtagaaacagtcccggaattacagagtaaggttcgtgatcctcgggtcaattttgatcagtccctacgtgtactgaaacatgccaagaaggttcagcctgatgttatttctaaaacatctataatgttgggtttaggcgagaatgatgagcaagtatatgcaacaatgaaagcacttcgtgaggcagatgtagactgcttgactttaggacaatatatgcagccaacaaggcgtcaccttaaggttgaagaatatattactcctgaaaaattcaaatactgggaaaaagtaggaaatgaacttggatttcattatactgcaagtggccctttggtgcgttcttcatataaagcaggtgaatttttcctgaaaaatctagtggctaaaagaaaaacaaaagacctctaaaacttcaacaagaccttcaagatcacagaaatttttaaaatttgattccagttaataacagaggtggtgccagaatgcctggactgcagtggatgtaccccacctctttgcttaaaaaaaaaaaaaaaa

SEQ ID NO: 550 - DNA, 426 bp, Artificial Sequence
  Description of Artificial sequences:primer
  misc_feature (1)..(426): 3' terminal sequence from clone image:267145. high-mobility group box 2(HMGB2) gene.
aatatacataattttattacaaaattttttttaaaaaaacgaaatgcaacatcctaaaaaacccaaaatttactattgatactaattcctacaagtttgctgtgctaccatacacaagaaattaaaaaaaccattaaatatttaggaacattcaacatcagaagctgtaaaatctaactgtatgagtagcccatcaaaaagctacaacctgcattttttaaaagtattttctctacagagaatcttatcagctatacaaaaatctgtacagtttttatactgaagctagtattgagctgcacttgaattcacattcttagcaaaataattgcctgagcacacacacacattccacacgcatcattaaaggatagccatttattcttcatcttcatcctcttcctcctcatcttcacggggcttcgg

SEQ ID NO: 551 - DNA, 523 bp, Artificial Sequence
  Description of Artificial sequences:primer
  misc_feature (1)..(523): 5' terminal sequence from clone image:267145. high-mobility group box 2(HMGB2) gene.
  misc_feature (44)..(44): n is a, c, g, or t
  misc_feature (47)..(47): n is a, c, g, or t
  misc_feature (75)..(75): n is a, c, g, or t
  misc_feature (78)..(78): n is a, c, g, or t
gattgcgttagagataaaccagttcacgccggagccccgtgagnagncgtctccgttgggtccggccgctctggnacntctgaggaaaagctcgcaccaggtggacgcggatctgtcaacatgggtaaaggagaccccaacaagccgcggggcaaaatgtcctcgtacgccttcttcgtgcagacctgccgggaagagcacaagaagaaacacccggactcttccgtcaatttcgcggaattctccaagaagtgttcggagagatggaagaccatgtctgcaaaggagaagtcgaagtttgaagatatggcaaaaagtgacaaagctcgctatgaaagggagatgaaaaattacgttcctcccaaaggtgataagaaggggaagaaaaaggaccccaatgctcctaaaaggccaccatctgccttcttcctgttttgctctgaacatcgcccaaagatcaaaagtgaacaccctggcctatccattggggatactgcaaagaaattgggtgaaatgtggtctt

SEQ ID NO: 552 - DNA, 1277 bp, Artificial Sequence
  Description of Artificial sequences:primer
  misc_feature (1)..(1277): high-mobility group box 2(HMGB2) gene.
gatgtggcccgtggcctagctcgtcaagttgccgtggcgcggagaactctgcaaaacaagaggctgaggattgcgttagagataaaccagttcacgccggagccccgtgagggaagcgtctccgttgggtccggccgctctgcgggactctgaggaaaagctcgcaccaggtggacgcggatctgtcaacatgggtaaaggagaccccaacaagccgcggggcaaaatgtcctcgtacgccttcttcgtgcagacctgccgggaagagcacaagaagaaacacccggactcttccgtcaatttcgcggaattctccaagaagtgttcggagagatggaagaccatgtctgcaaaggagaagtcgaagtttgaagatatggcaaaaagtgacaaagctcgctatgacagggagatgaaaaattacgttcctcccaaaggtgataagaaggggaagaaaaaggaccccaatgctcctaaaaggccaccatctgccttcttcctgttttgctctgaacatcgcccaaagatcaaaagtgaacaccctggcctatccattggggatactgcaaagaaattgggtgaaatgtggtctgagcagtcagccaaagataaacaaccatatgaacagaaagcagctaagctaaaggagaaatatgaaaaggatattgctgcatatcgtgccaagggcaaaagtgaagcaggaaagaagggccctggcaggccaacaggctcaaagaagaagaacgaaccagaagatgaggaggaggaggaggaagaagaagatgaagatgaggaggaagaggatgaagatgaagaataaatggctatcctttaatgatgcgtgtggaatgtgtgtgtgtgctcaggcaattattttgctaagaatgtgaattcaagtgcagctcaatactagcttcagtataaaaactgtacagatttttgtatagctgataagattctctgtagagaaaatacttttaaaaaatgcaggttgtagctttttgatgggctactcatacagttagattttacagcttctgatgttgaatgttcctaaatatttaatggtttttttaatttctgtgtgtatggtagcacagcaaacttgtaggaattagtatcaatagtaaattttgggttttttaggatgttgcatttcgtttttttaaaaaaaattttgtaataaaattatgtatattatttctattgtctttgtcttaatatgctaagttaattttcactttaaaaaagccatttgaagaccaaaaaaaaaaaaa

SEQ ID NO: 553 - DNA, 556 bp, Artificial Sequence
  Description of Artificial sequences:primer
  misc_feature (1)..(556): 3' terminal sequence from clone image:267657. apr-1 protein(MAGEH1) gene.
  misc_feature (417)..(417): n is a, c, g, or t
  misc_feature (501)..(501): n is a, c, g, or t
  misc_feature (545)..(545): n is a, c, g, or t
actattcgttaggcttttatttttctctatgttctgcagtaactaaggaaaatcatggtaaatgtcaatcttcacacaacagcagacacaaagggtttcagaaacgtcagatatgaagaaatcctccatccttcttcaacattttactgggtatttcaacttcaaaagaacagcttatttctataagtgctgtacaagatcatagattatgatggaacgacttcattttagaacgttagcaaaactgttatactaaatgtcaatgacaggaaacaaagaaaaaaatttgttcaattatatttttaaacatattgttattctcaacaaacggaattttaaaacgaatacaattttccattatcaaaaagcaaacactctatttcgcagttgaacaatgatcactgatcacaaatatcnaatacagtgtcccccgcccccaatcgacatcattttccacttagggaccctggcatccactccctgggggtacccgtgactccncctttacaccccccaggggctggcctcagatctacctaaggggngggataacccc

SEQ ID NO: 554 - DNA, 464 bp, Artificial Sequence
  Description of Artificial sequences:primer
  misc_feature (1)..(464): 5' terminal sequence from clone image:267657. apr-1 protein(MAGEH1) gene.
  misc_feature (393)..(393): n is a, c, g, or t
  misc_feature (419)..(419): n is a, c, g, or t
aacagcgccaaggaagctctggtctggaaagtgctggggaagttaggaatgcagcctggacgtcagcacagcatctttggagatccgaagaagatcgtcacagaagagtttgtgcgcagagggtacctgatttataaaccggtgccccgtagcagtccggtggagtatgagttcttctgggggccccgagcacacgtggaatcgagcaaactgaaagtcatgcattttgtggcaagggttcgtaaccgatgctctaaagactggccttgtaattatgactgggattcggacgatgatgcagaggttgaggctatcctcaattcaggtgctaggggttattccgccccttaagtagatctggaggcagacccttgggggttgtaaaagagagtnacaggtacccccaaaggagtagatgncaaggggccctaagttgcaaaatgatgtcgattttggggccgggg

SEQ ID NO: 555 - DNA, 1475 bp, Artificial Sequence
  Description of Artificial sequences:primer
  misc_feature (1)..(1475): apr-1 protein(MAGEH1) gene.
gcgtggcaggagaggcggggccaattttgctgagctttctcgcgggcttgcagctgcggcaagtgctggcggcggctgctcgcgcaagtcagctggcgtgggaactaccctttgtagctgagaacggcttgtttattgctacaaagactctattgacattggtagcttcagcggcagcagcttcttacggtataaagctgttgcttcctgaagaggctacaagcatccttccctaggactgctgtaagctttgagcctctagcaggagacatgcctcggggacgaaagagtcggcgccgccgtaatgcgagagccgcagaagagaaccgcaacaatcgcaaaatccaggcctcagaggcctccgagacccctatggccgcctctgtggtagcgagcacccccgaagacgacctgagcggccccgaggaagacccgagcactccagaggaggcctctaccacccctgaagaagcctcgagcactgcccaagcacaaaagccttcagtgccccggagcaattttcagggcaccaagaaaagtctcctgatgtctatattagcgctcatcttcatcatgggcaacagcgccaaggaagctctggtctggaaagtgctggggaagttaggaatgcagcctggacgtcagcacagcatctttggagatccgaagaagatcgtcacagaagagtttgtgcgcagagggtacctgatttataaaccggtgccccgtagcagtccggtggagtatgagttcttctgggggccccgagcacacgtggaatcgagcaaactgaaagtcatgcattttgtggcaagggttcgtaaccgatgctctaaagactggccttgtaattatgactgggattcggacgatgatgcagaggttgaggctatcctcaattcaggtgctaggggttattccgccccttaagtagatctgaggcagacccttgggggtgtaaaagagagtcacaggtaccccaaggagtagatgccagggtcctaagttgaaaatgatgtcgattgggggcgggggacactgtatttgatatttgtgatcagtgatcattgttcaactgcgaaatagagtgtttgcttttgataatggaaaattgtattcgttttaaaattccgtttgttgagaataacaatatgtttaaaaatataattgaacaaatttttttctttgtttcctgtcattgacatttagtataacagttttgctaacgttctaaaatgaagtcgttccatcataatctatgatcttgtacagcacttatagaaataagctgttcttttgaagttgaaatacccagtaaaatgttgaagaaggatggaggatttcttcatatctgacgtttctgaaaccctttgtgtctgctgttgtgtgaagattgacatttaccatgattttccttagttactgcagaacatagagaaaaataaaagcctaacgaatagtaaaaaaaaaaaaaa

SEQ ID NO: 556 - DNA, 453 bp, Artificial Sequence
  Description of Artificial sequences:primer
  misc_feature (1)..(453): 3' terminal sequence from clone image:268150. mad, mothers against decapentaplegic homolog 1 (drosophila)(MADH1) gene.
  misc_feature (378)..(378): n is a, c, g, or t
gtttaaatttctgaatccaacagttggtcacagaggtcaagtattatcaaggctcctttgtcagttctcaatcgtgtctgactcatccatccttcaagtacatgcaaggctcaatagttttccagaggcagatgcctggggccatttaagatacagatgaaataggattatgaggtgaacccatttgagtaagaactttatccagccactggagggggccgtgcagatgtatctcaatccagcagggggtgctagtaacatcctggcggtggtattctgctccccagcccttcacaaagctcatacgtacagtacacattttttgtaagctcatagactgtctcaaatccatgggttcacagactgtgccaataactngagcaaattcctgggttggttaaaaattttcagactacacccactagggatcttggccaacagtagtaggatgaa

SEQ ID NO: 557 - DNA, 479 bp, Artificial Sequence
  Description of Artificial sequences:primer
  misc_feature (1)..(479): 5' terminal sequence from clone image:268150. mad, mothers against decapentaplegic homolog 1 (drosophila)(MADH1) gene.
  misc_feature (191)..(191): n is a, c, g, or t
  misc_feature (201)..(201): n is a, c, g, or t
  misc_feature (204)..(204): n is a, c, g, or t
  misc_feature (208)..(208): n is a, c, g, or t
  misc_feature (211)..(211): n is a, c, g, or t
  misc_feature (218)..(218): n is a, c, g, or t
  misc_feature (243)..(243): n is a, c, g, or t
  misc_feature (293)..(294): n is a, c, g, or t
  misc_feature (304)..(304): n is a, c, g, or t
  misc_feature (310)..(310): n is a, c, g, or t
  misc_feature (379)..(379): n is a, c, g, or t
  misc_feature (427)..(427): n is a, c, g, or t
  misc_feature (443)..(443): n is a, c, g, or t
  misc_feature (450)..(450): n is a, c, g, or t
  misc_feature (472)..(472): n is a, c, g, or t
  misc_feature (478)..(478): n is a, c, g, or t
tgcatttggagacagctttatttcaccatatccaaggagtataactagtgctgtcattatgaatgtgacaagtttattttcctttacaagtccagctgtgaagagacttcttgggtggaaacagggcgatgaagaagaaaaatgggcagagaaagctgttgatgctttggtgaaaaaactgaagaaaaagnaaggtggcanggnaggnacntggaaanggcctggagcctgcccaggggcaanccgaagtaaactgtgtcaccattcccccgctctctgggatggcaggctgnnaagtctcccnaccggnaagggaatgcctcatgtcatttactgcccgtgtgtggcgctggcccgaatctttcagagcccaccatgnaactaaaaaccactgggaatgcctgttgagttttccctttttgggttnccaagccagaagggangttctgnatccaatcccctaccactatanaagatnt

SEQ ID NO: 558 - DNA, 2173 bp, Artificial Sequence
  Description of Artificial sequences:primer
  misc_feature (1)..(2173): mad, mothers against decapentaplegic homolog 1 (drosophila)(MADH1) gene.
atgatataaattatgcatagattccctggaaagccctcaaaagtctgctaaattcctgttgccaccaaatattgtttctttggggaaatatattctgattcctaacaaccaacaataatcataagttttaaatctctcctctctcctctcatgcagtttatgaaacgggctgcttttctgtttgtagctgaggccacaggagctggagggattgcaaagacctttattagagcatccatctggtgaccctggcagggaaacttaggatctaaccctaggatctggctagggctctgtaactgactgttagccagccctgcctctccaggataattatatttatagtggctttgcctcaggaggtttctggaggttgatgaccatgccaattattaactccttagcttcctaatgtagaacatttaggagtgacaggagttgttttctttgcttctcaacaggtgcctacctattgggccgcctttgtaccttgagttttcagttagcaaaatgtgaattgtatgaactaattcttccttgacctcacaggtggtggtaaggattcttgaaaagtgggtaagatccttagaaaaaagatgttcataaagtgtgactcctaggacaggatacaagataaattctgtcccacaaagcacctcatattttgtataattaactatcttcatggcatttgcattttctacagttcactgattttacctcttcagctttatttactatgctgcttttttgtgttaaagtgaattagtgtgtcagcttaaaacacttgtggtgaataattcatatcattcaataagcattaactcttaaatgtgaagtcttatcagccagggctgtgaaatataattgtcaatggtgataaacaattatgctttggtttttagtgaatgaaaaaattaagaatgagggaaccttaacatttttaacctaaaagattgtattttgccaactttccttgggcaatttgtgaatactgcaaatctcaggcatatgtcatcagtgattctaaagggattgtatttgttcctgcatttgttcttgagggtaaaatagcttttcatttgaatgatgcttttgagttggcagcaggacagggatcagataatttgttgttgtttacagattatgttttactttattgtgatgtaattatagatcataattctcatgtttgtccttctcttttttcccttcctttttctagtacttcctcctgtgctggttccaagacacagcgaatataatcctcagcacagcctcttagctcagttccgtaacttaggacaaaatgagcctcacatgccactcaacgccacttttccagattctttccagcaacccaacagccacccgtttcctcactctcccaatagcagttacccaaactctcctgggagcagcagcagcacctaccctcactctcccaccagctcagacccaggaagccctttccagatgccaggtaggttggaatgttcagtgatgttctgtagtcatatcagacagtgttatcacagtgtcacggaaaagctgggtcaacctgcagtggagggaggttttcagccctggtatatgacatagtgctctcgcacttttaggatacaacttttggtgaaaggagacctcatagtcaagtaagcaaatgtcttattttatttgtcaggcacagatgcttgaataagctatattttccccttgtttttaaaaggttttgaaacagctgcatccttctgggagtggcataattgttacagtctttactcttgataaaaagaaaaataccgtgttacacacatttgctcttatgagaacacaacctcaatcagcatcgttttcatacatggaaaaaactcctgttgcaagtgcaacctcagaaaaaatatttcctgagggatcccaccccctacttaattaaattcattcaaatgatgatgtaatcccaagaaacgtatactttaacaacaaaggaattacaacagaagtactggaaaccatctgcttgttcaacttagcaaagacaaaaaacaattatcctctttttctagacataactgttggtgtaatggttatcaaaataaatgattaataaggacattatatatttttaagttacaggttaatgagcaagcatctccaaaaaaaaaaaaaaaaa

SEQ ID NO: 559 - DNA, 431 bp, Artificial Sequence
  Description of Artificial sequences:primer
  misc_feature (1)..(431): 3' terminal sequence from clone image:269388. acyl-coenzyme a dehydrogenase, very long chain(ACADVL) gene.
  misc_feature (163)..(163): n is a, c, g, or t
  misc_feature (327)..(327): n is a, c, g, or t
tgactggctagaaatttttattatttgcgaggcagtaagtgctcttgagagcaggcacagtgctgggaacactaggccccttcgggacaaaccagggccttaaggaaaggggcttcggctttggcttgagggaaggcacataactgggacaggccctggcggngagtattcagaagccaagtgggttgctggtgaccacaccaccccgctccaccaaggccttggagatgcttttgaagttgcggtagagctcttgctgccaggggtcagactgcagggcggccatgcctctcggatccgagcttgcagcctccgatacaccaggtntcacagagcattttctcatgctgggccgtgggggtggccctcaactcagggatcttgaggccctccgagagaaccaccaccatggcatagaggtcgatggcccc

SEQ ID NO: 560 - DNA, 2219 bp, Artificial Sequence
  Description of Artificial sequences:primer
  misc_feature (1)..(2219): acyl-coenzyme a dehydrogenase, very long chain(ACADVL) gene.
aggacgtgggcgtgcaggacgcgggcgtgcaggacgccagagctgggtcagagctcgagccagcggcgcccggagagattcggagatgcaggcggctcggatggccgcgagcttggggcggcagctgctgaggctcgggggcggaagctcgcggctcacggcgctcctggggcagccccggcccggccctgcccggcggccctatgccgggggtgccgctcagctggctctggacaagtcagattcccacccctctgacgctctgaccaggaaaaaaccggccaaggcggaatctaagtcctttgctgtgggaatgttcaaaggccagctcaccacagatcaggtgttcccatacccgtccgtgctcaacgaagagcagacacagtttcttaaagagctggtggagcctgtgtcccgtttcttcgaggaagtgaacgatcccgccaagaatgacgctctggagatggtggaggagaccacttggcagggcctcaaggagctgggggcctttggtctgcaagtgcccagtgagctgggtggtgtgggcctttgcaacacccagtacgcccgtttggtggagatcgtgggcatgcatgaccttggcgtgggcattaccctgggggcccatcagagcatcggtttcaaaggcatcctgctctttggcacaaaggcccagaaagaaaaatacctccccaagctggcatctggggagactgtggccgctttctgtctaaccgagccctcaagcgggtcagatgcagcctccatccgaacctctgctgtgcccagcccctgtggaaaatactataccctcaatggaagcaagctttggatcagtaatgggggcctagcagacatcttcacggtctttgccaagacaccagttacagatccagccacaggagccgtgaaggagaagatcacagcttttgtggtggagaggggcttcgggggcattacccatgggccccctgagaagaagatgggcatcaaggcttcaaacacagcagaggtgttctttgatggagtacgggtgccatcggagaacgtgctgggtgaggttgggagtggcttcaaggttgccatgcacatcctcaacaatggaaggtttggcatggctgcggccctggcaggtaccatgagaggcatcattgctaaggcggtagatcatgccactaatcgtacccagtttggggagaaaattcacaactttgggctgatccaggagaagctggcacggatggttatgctgcagtatgtaactgagtccatggcttacatggtgagtgctaacatggaccagggagccacggacttccagatagaggccgccatcagcaaaatctttggctcggaggcagcctggaaggtgacagatgaatgcatccaaatcatggggggtatgggcttcatgaaggaacctggagtagagcgtgtgctccgagatcttcgcatcttccggatctttgaggggacaaatgacattcttcggctgtttgtggctctgcagggctgtatggacaaaggaaaggagctctctgggcttggcagtgctctaaagaatccctttgggaatgctggcctcctgctaggagaggcaggcaaacagctgaggcggcgggcagggctgggcagcggcctgagtctcagcggacttgtccacccggagttgagtcggagtggcgagctggcagtacgggctctggagcagtttgccactgtggtggaggccaagctgataaaacacaagaaggggattgtcaatgaacagtttctgctgcagcggctggcagacggggccatcgacctctatgccatggtggtggttctctcgagggcctcaagatccctgagtgagggccaccccacggcccagcatgagaaaatgctctgtgacacctggtgtatcgaggctgcagctcggatccgagagggcatggccgccctgcagtctgacccctggcagcaagagctctaccgcaacttcaaaagcatctccaaggccttggtggagcggggtggtgtggtcaccagcaacccacttggcttctgaatactcccggccagggcctgtcccagttatgtgccttccctcaagccaaagccgaagcccctttccttaaggccctggtttgtcccgaaggggcctagtgttcccagcactgtgcctgctctcaagagcacttactgcctcgcaaataataaaaatttctagccag

SEQ ID NO: 561 - DNA, 419 bp, Artificial Sequence
  Description of Artificial sequences:primer
  misc_feature (1)..(419): 3' terminal sequence from clone image:26945. regulator of nonsense transcripts 1(RENT1) gene.
  misc_feature (25)..(25): n is a, c, g, or t
  misc_feature (310)..(310): n is a, c, g, or t
tttttttttacgcagtggaaaacanggtatccgtttatttttattttttattacccagaataagatgctgatggactaagccacgttgcttagctcttccgccgccaccttttaatactgggacagccccgtcaccccgccatgctggtaagccgctctccctggtacgtggagtcctgtgagagcgccacgtcgatttgtgatttaaactcgtcaccaaggtaactgtcctgggacagctccggctgggagaggccgggctggctcatctgggaaggctggctcatggagatgtagccctgcgtcaggngccctgagagaagggctgtgacgccacatcctgggctggcttggctgttgggggaggttagtctggctgggtccagggaagcccaaagcggttctttcttggcgtcccc

SEQ ID NO: 562 - DNA, 396 bp, Artificial Sequence
  Description of Artificial sequences:primer
  misc_feature (1)..(396): 5' terminal sequence from clone image:26945. regulator of nonsense transcripts 1(RENT1) gene.
  misc_feature (16)..(16): n is a, c, g, or t
  misc_feature (119)..(119): n is a, c, g, or t
  misc_feature (141)..(141): n is a, c, g, or t
  misc_feature (328)..(328): n is a, c, g, or t
ccaggcaccgagccgnagtgcatggttcccgtggtcctcggggccaagcagctgatccttgtaggcgaccactgccagctgggcccagtggtgatgtgcaagaaggcggccaaggcggnctgtcacagtcgctcttcgagncctggtggtgctgggcatccggcccatccgcctgcaggtccagtaccggatgcaccctgcactcagcgccttcccatccaacatcttctacgagggctccctccagaatggtgtcactgcagcggatcgtgtgaagaagggatttgatttccagtgggccccaacccgataaaaccgatgttttttntacgttgacccaggggccaagagggagatttgccagtttggggcaacttcttaccttgaacagggacc

SEQ ID NO: 563 - DNA, 5300 bp, Artificial Sequence
  Description of Artificial sequences:primer
  misc_feature (1)..(5300): regulator of nonsense transcripts 1(RENT1) gene.
agcggctggcggcttcgaggggagctgaggcgcggaggggctcggcggcagcggcggcggctcggcactgttacctctcggtccggctggcgccggggcgggcggtttggtcctttccgggcgcgcgggggcgacagcggcagcgacccgaggcctgcggcctaggcctcagcgcggcggcgggctcgagtgcagcgcggaaccggcccgagggccctacccggaggcaccatgagcgtggaggcgtacgggcccagctcgcagactctcactttcctggacacggaggaggccgagctgcttggcgccgacacacagggctccgagttcgagttcaccgactttactcttcctagccagacgcagacgccccccggcggccccggcggcccgggcggtggcggcgcgggaggcccgggcggcgcgggcgcgggcgctgcggcgggacagctcgacgcgcaggttgggcccgaaggcatcctgcagaacggggctgtggacgacagtgtagccaagaccagccagttgttggctgagttgaacttcgaggaagatgaagaagacacctattacacgaaggacctccccatacacgcctgcagttactgtggaatacacgatcctgcctgcgtggtttactgtaataccagcaagaagtggttctgcaacggacgtggaaatacttctggcagccacattgtaaatcaccttgtgagggcaaaatgcaaagaggtgaccctgcacaaggacgggcccctgggggagacagtcctggagtgctacaactgcggctgtcgcaacgtcttcctcctcggcttcatcccggccaaagctgactcagtggtggtgctgctgtgcaggcagccctgtgccagccagagcagcctcaaggacatcaactgggacagctcgcagtggcagccgctgatccaggaccgctgcttcctgtcctggctggtcaagatcccctccgagcaggagcagctgcgggcacgccagatcacggcacagcagatcaacaagctggaggagctgtggaaggaaaacccttctgccacgctggaggacctggagaagccgggggtggacgaggagccgcagcatgtcctcctgcggtacgaggacgcctaccagtaccagaacatattcgggcccctggtcaagctggaggccgactacgacaagaagctgaaggagtcccagactcaagataacatcactgtcaggtgggacctgggccttaacaagaagagaatcgcctacttcactttgcccaagactgactctgacatgcggctcatgcagggggatgagatatgcctgcggtacaaaggggaccttgcgcccctgtggaaagggatcggccacgtcatcaaggtccctgataattatggcgatgagatcgccattgagctgcggagcagcgtgggtgcacctgtggaggtgactcacaacttccaggtggattttgtgtggaagtcgacctcctttgacaggatgcagagcgcattgaaaacgtttgccgtggatgagacctcggtgtctggctacatctaccacaagctgttgggccacgaggtggaggacgtaatcatcaagtgccagctgcccaagcgcttcacggcgcagggcctccccgacctcaaccactcccaggtttatgccgtgaagactgtgctgcaaagaccactgagcctgatccagggcccgccaggcacggggaagacggtgacgtcggccaccatcgtctaccacctggcccggcaaggcaacgggccggtgctggtgtgtgctccgagcaacatcgccgtggaccagctaacggagaagatccaccagacggggctaaaggtcgtgcgcctctgcgccaagagccgtgaggccatcgactccccggtgtcttttctggccctgcacaaccagatcaggaacatggacagcatgcctgagctgcagaagctgcagcagctgaaagacgagactggggagctgtcgtctgccgacgagaagcggtaccgggccttgaagcgcaccgcagagagagagctgctgatgaacgcagatgtcatctgctgcacatgtgtgggcgccggtgacccgaggctggccaagatgcagttccgctccattttaatcgacgaaagcacccaggccaccgagccggagtgcatggttcccgtggtcctcggggccaagcagctgatccttgtaggcgaccactgccagctgggcccagtggtgatgtgcaagaaggcggccaaggccgggctgtcacagtcgctcttcgagcgcctggtggtgctgggcatccggcccatccgcctgcaggtccagtaccggatgcaccctgcactcagcgccttcccatccaacatcttctacgagggctccctccagaatggtgtcactgcagcggatcgtgtgaagaagggatttgacttccagtggccccaacccgataaaccgatgttcttctacgtgacccagggccaagaggagattgccagctcgggcacctcctacctgaacaggaccgaggctgcgaacgtggagaagatcaccacgaagttgctgaaggcaggcgccaagccggaccagattggcatcatcacgccctacgagggccagcgctcctacctggtgcagtacatgcagttcagcggctccctgcacaccaagctctaccaggaggtggagatcgccagtgtggacgcctttcagggacgcgagaaggacttcatcatcctgtcctgtgtgcgggccaacgagcaccaaggcattggctttttaaatgaccccaggcgtctgaacgtggccctgaccagagcaaggtatggcgtcatcattgtgggcaacccgaaggcactatcaaagcagccgctctggaaccacctgctgaactactataaggagcagaaggtgctggtggaggggccgctcaacaacctgcgtgagagcctcatgcagttcagcaagccacggaagctggtcaacactatcaacccgggagcccgcttcatgaccacagccatgtatgatgcccgggaggccatcatcccaggctccgtctatgatcggagcagccagggccggccttccagcatgtacttccagacccatgaccagattggcatgatcagtgccggccctagccacgtggctgccatgaacattcccatccccttcaacctggtcatgccacccatgccaccgcctggctattttggacaagccaacgggcctgctgcagggcgaggcaccccgaaaggcaagactggtcgtgggggacgccagaagaaccgctttgggcttcctggacccagccagactaacctccccaacagccaagccagccaggatgtggcgtcacagcccttctctcagggcgccctgacgcagggctacatctccatgagccagccttcccagatgagccagcccggcctctcccagccggagctgtcccaggacagttaccttggtgacgagtttaaatcacaaatcgacgtggcgctctcacaggactccacgtaccagggagagcgggcttaccagcatggcggggtgacggggctgtcccagtattaaaaggtggcggcggaagagctaagcaacgtggcttagtccatcagcatcttattctgggtaataaaaaataaaaataaacggatacctgttttccactgctaaaactgaagcaccactgtgtgagcaacaggaagggagagcgcacgagggagaggagccgaggccgagcgccccctgctggcccgcggcggcgaggagcagagggagcggaggaggggccggcccgcgggagccgcggccaccaggaggccccgctccgtcccatcggggctgcggccagggcggagggaggaagaccctcatctcagagtagccctttcctctgttcttttatttctttttctctttgattgaaaggggactacgtcttagcaggaaaaaaaacttcgcatttctgtgcccgagcaggctccttgcaaagacagcagcgtgcggggcagagccccgggagggcgcgtctgtccacgcctaccggacgcgccgaggtcgcgctgcctgtgttctccgagggccttcatttaaagaaaataagggtgttttgggtttttctctttgtttttttcaagattcttttaaaggagtactgaagaatactttcctaagtttgtctctaaaatcttagcggtggacctgggagatttgagaagcttccagaaacagtttaaacaagccagcgctactggagaagaggagcaacacctgtgccgcggccggaggagttttgttgttggttttagcttccagtggcttctttctgcggggcatcaggctgctggggtagccgcccgccgagcctggaagctgctcgttctccgctggactcagaagccaagctgcttcccgcctagactcggcgcagggccccgcaccggtgaggaaggtgcttttggccccattgcgaggggccttggccaggactggccctgtggccaggaggcgagaaggtggctgttcccggattgacggctttttcccgggggcctttggaagatttggtggaaggacaagagggcctgtccctgtccccgtccccaggaggtaccgacagtccctgtgctggttagacacggagcgctgcacaccgaaagcccaaattgggagctctgcctgccggcaactttgctgatggggtgattgctgcttctggggggtaaggaaacaagttacagaaattaccgcgttctgtgtgaagggactgagggtgtggtgtcattggcagagggtcattttaggagagctgccccagcccctcgaacgcctggcttggggtgtcattctgcctggcggccaggcctccagcttcccctgccccgggcctggggctgtcactggccctgatccgaacacctccagattccggcttctacatgggacagacggggacgcacaggccaccttccttctggcagggactcttatttattcccattgctctagggctttcggtttccccttcttccggtaggccgcgtagaggcatgcaccgggtaggtttccgcggtgaccccgcggcggcctgagggacgctccctgccccatcccggctgttgggctgggccgctttgcctctgcttcgccctgtgctgtgttctccagctttgtagcagcagccttgacaaacccaggcgcactgtaccaaggcaatgtaacttttgattttcggtcaatttaagttcttttgtcaccaaatattaataaacagttttgacttc

SEQ ID NO: 564 - DNA, 297 bp, Artificial Sequence
  Description of Artificial sequences:primer
  misc_feature (1)..(297): 3' terminal sequence from clone image:26964. nuclear phosphoprotein similar to s. cerevisiae pwp1(PWP1) gene.
  misc_feature (26)..(26): n is a, c, g, or t
  misc_feature (295)..(295): n is a, c, g, or t
tttttttttaccatttgaaaattttnggtatttattaaatacaaattcttattttaaggcagacctatatgactacataaagcagtagaagttattttttatacgtaactaggtcttttcctgagaatggaaagtcctgggaagatgcctattttagagttattctttatagaagaaaacatcaaatttcagagagaattaactgactttaaatctattagaggtctccctctgttactaatttttagtgatctgggccttattttaatacctaaaagccaaatcaaaacaaagnaa

SEQ ID NO: 565 - DNA, 310 bp, Artificial Sequence
  Description of Artificial sequences:primer
  misc_feature (1)..(310): 5' terminal sequence from clone image:26964. nuclear phosphoprotein similar to s. cerevisiae pwp1(PWP1) gene.
  misc_feature (277)..(277): n is a, c, g, or t
  misc_feature (294)..(294): n is a, c, g, or t
tgggatataagcacagtctcttcagtaaatgaagcatttggaagacgagagaggcttgttcttgggagtgcaagaaattcatctattagtggcccttttggcagcaggagctcagatacacccatggagtcttaatgaagatcatctaatttcctgcttaccttaactgggaattttaaaaagttggcctaaaaatgttccatgcgtggcaggcaaccatgcagagtgactgaaacacaatttcatttctggactgacattcctttctggcaactgnggtgggcaccacaattntccggtctttgtgctt

SEQ ID NO: 566 - DNA, 1853 bp, Artificial Sequence
  Description of Artificial sequences:primer
  misc_feature (1)..(1853): nuclear phosphoprotein similar to s. cerevisiae pwp1(PWP1) gene.
gatccctgagcgtgtggcagcagtgcggtcgtggtccctccctatgcagcctggtttctagcgtgacacgcccttgacttgaggaccatgaaccgcagccgccaggtgacgtgcgtggcctgggtccgctgcggcgtggccaaagagacaccagacaaggtagagctgagtaaagaagaagtaaaacgcctcattgctgaggcaaaggagaaattgcaagaagaaggtggtggcagtgatgaagaggagacaggcagtccttcagaagatggcatgcagagtgcacgcacccaggcacgcccaagagagcccctggaggatggtgacccagaggatgacaggacgcttgatgatgatgagctggctgagtacgacttagataaatatgatgaggaaggtgacccagatgctgagactcttggtgaatctctcttgggtcttacggtctacgggagtaatgatcaagatccttacgttactctgaaagatacagaacaatatgaacgtgaagatttcttgattaagcccagtgataatcttatagtttgtggccgagctgaacaggaccagtgcaatttagaggtgcatgtttataatcaagaagaagactctttttatgtacaccatgatatactcttgtctgcatatcctctgagtgtggaatggctgaattttgatcctagcccagatgattctactggaaattacattgctgtaggaaacatgacccctgttattgaagtgtgggaccttgatatagtggactctttagagccagtcttcacactcggaagtaaactttcaaaaaagaagaaaaagaaaggaaagaagagttcctcagcagaagggcataccgatgctgtccttgacctttcatggaataagctaatcagaaatgttttagcaagtgcatcagctgacaacactgtaattctgtgggatatgtccttggggaaaccagcagctagcctcgctgtacacacagacaaggtccaaacactgcagtttcatccatttgaagcacagactctgatttctggctcatatgataagtcagtggctttgtatgactgccgaagtccagatgaaagccatcgaatgtggcgattcagtgggcagatagagagagtgacttggaatcacttttcaccttgtcatttcttggccagtacagatgacggctttgtatataatttggatgcacgttcagataagccaatttttacacttaatgcacacaatgatgaaatctctggtcttgatcttagcagtcaaatcaagggctgtctcgtgactgcttcagctgacaaatacgtgaagatctgggacatcttaggagataggccaagtctagttcattctagggacatgaaaatgggagttctcttctgttcttcatgttgccctgatttgccatttatttatgcctttggaggtcaaaaagaagggcttcgggtctgggatataagcacagtctcttcagtaaatgaagcatttggaagacgagagaggcttgttcttgggagtgcaagaaattcatctattagtggcccttttggcagcaggagctcagatacacccatggagtcttaatgaagatcatctaatttcctgcttaccttaactgggaattttaaaaagttggcctaaaaatgttccatgcgtggcagcaaccatgcagagtgactgaaacacaattcatttctgactgacattcctttctgcaactgcggtggcaccacaaatatccggtctttgtgcttgctcttcagatggatggtttgtaaggctcttgttgcatttcttaaaaaagagtaataaaaaggatttttaaaaagtaattccttaaacat

SEQ ID NO: 567 - DNA, 418 bp, Artificial Sequence
  Description of Artificial sequences:primer
  misc_feature (1)..(418): 3' terminal sequence from clone image:270794. hypothetical protein ptd004(PTD004) gene.
  misc_feature (7)..(7): n is a, c, g, or t
  misc_feature (416)..(416): n is a, c, g, or t
gtttatntgagcaataactaaattttatttcttcttcggttgttgaggtgtgttaaatttgaagaagataatatctccatcttcaacaatataatttctgccttgttgtctgtactttccagcagccttgactgcattttcagaaccttcctctttaaaatcttcgtatttcattacttcagccataatgaatcccttttcaaaatctgtgtgaatctttcctgcagcctgaggagccttagtccctttcctgatggtccatgcacgcacttcatctgggcctgcagtgaaaaagtattctagttggagtgctgcaaacccagccttaatgatctttgggcaaagcactttgtgtcatgttcgcttccagatacttctgtctctcctcagcactcaattcttgcaacttgagttcnag

SEQ ID NO: 568 - DNA, 418 bp, Artificial Sequence
  Description of Artificial sequences:primer
  misc_feature (1)..(418): 5' terminal sequence from clone image:270794. hypothetical protein ptd004(PTD004) gene.
  misc_feature (8)..(8): n is a, c, g, or t
  misc_feature (209)..(209): n is a, c, g, or t
aattggtnctgttggattgccaaatgttgggaaatctactttcttcaatgtgttaaccaatagtcaggcttcagcagaaaacttcccgttctgcactattgatcctaatgagagcagagtacctgtgccagatgaaaggtttgactttctttgtcaataccacaaaccagcaagcaaaattcctgcctttctaaatgtggtggatattnctggccttgtgaaaggagctcacaatgggcagggctggggaatgcttttttatctcatattagtgcctgtgatggcatctttcatctaacacgtgcttttgaagatgatgatatcacgcacgttgaaggaagtgtagatcctattcgagatatagaaataatacatgaagagcttcagcttaaagatgaggaaatgattgggcccatta

SEQ ID NO: 569 - DNA, 4193 bp, Artificial Sequence
  Description of Artificial sequences:primer
  misc_feature (1)..(4193): hypothetical protein ptd004(PTD004) gene.
cacgatgccccctaaaaagggaggtgatggaattaaaccacccccaatcattggaagatttggaacctcactgaaaattggtattgttggattgccaaatgttgggaaatctactttcttcaatgtgttaaccaatagtcaggcttcagcagaaaacttcccgttctgcactattgatcctaatgagagcagagtacctgtgccagatgaaaggtttgactttctttgtcaataccacaaaccagcaagcaaaattcctgcctttctaaatgtggtggatattgctggccttgtgaaaggagctcacaatgggcagggcctggggaatgcttttttatctcatattagtgcctgtgatggcatctttcatctaacacgtgcttttgaagatgatgatatcacgcacgttgaaggaagtgtagatcctattcgagatatagaaataatacatgaagagcttcagcttaaagatgaggaaatgattgggcccattatagataaactagaaaaggtggctgtgagaggaggagataaaaaactaaaacctgaatatgatataatgtgcaaagtaaaatcctgggttatagatcaaaagaaacctgttcgcttctatcatgattggaatgacaaagagattgaagtgttgaataaacacttatttttgacttcaaaaccaatggtctacttggttaatctttctgaaaaagactacattagaaagaaaaacaaatggttgataaaaattaaagagtgggtggacaagtgtgacccaggtgctttggtcattccttttagtggggccttggaactcaagttgcaagaattgagtgctgaggagagacagaagtatctggaagcgaacatgacacaaagtgctttgccaaagatcattaaggctgggtttgcagcactccaactagaatactttttcactgcaggcccagatgaagtgcgtgcatggaccatcaggaaagggactaaggctcctcaggctgcaggaaagattcacacagattttgaaaagggattcattatggctgaagtaatgaaatacgaagattttaaagaggaaggttctgaaaatgcagtcaaggctgctggaaagtacagacaacaaggcagaaattatattgttgaagatggagatattatcttcttcaaatttaacacacctcaacaaccgaagaagaaataaaatttagttattgctcagataaacatacaacttccaaaaggcatctgatttttaaaaaattaaaatttctgaaaaccaatgcgacaaataaagttggggagatgggaatctttgacaaacaaattatttttatttgttttaaaattaaaatactgtgtacccccccccactccatgaaatgcaggttcactaaatgtgaacagctttgcttttcacgtgattaagaccctactccaaattgtagaagcttttcaggaaccatattactctcatgatacttcattaatctccatcatgtatgccaagcctgacacatttgacagtgaggacaatgtggcttgctcctttttgaatctacagataatgcatgttttacagtactccagatgtctacactcaataaaacatttgacaaaaccagccttggtgtgtttggggatgtctgtattgactgactgtggtgtgctgaatgcgatacggcacctggtggttgctgattacagaattttaaggcgtgtgtatgacacagtaactggcagtgtggggcagctgcaattgtatcttaaaagtgagtctttcatgggaatcagaagaatagtataccagggatttgtctcaaaaaagttaattaatttatagatcaacatttattgaaagatgatagcaatgatattatgagggatatgagataggtgactgaccacaaagaagaaaattctgtctcaaaaattaaagaattttgtttgttattgttgttctgaccatattgaaaagaggttcacttttaatctttcctttgaaattattaaattgtaaaaactgacccattgatgtctggtgggttatgttttgcttcaattcagcaatgtgtataaaagttcctacactgattttgaaatactaagatcagactttgaaaattttaaaaattctttcattcttacttttcagatatttgagagcagtcgaagtggtagtatgggtaaattaagcacttcttaacattgtagcagaaaattccaaaagaaagactagaacaaattggtaatttggagaccctttgccacttagtcttctcttgtgatgatggcctgaaagctctctcggccctgagcctccctttctctcccatgtttccattcctgtgagacctcccttccttgtccttgtcctctgcccttttgtgctcttctgtgatcacaggaccatttccatggaatgcagattcatacccagccagcctttgcctctactgtatcgctttgggactttaaagatgcagaagtattagaacacacacaaacttaaaatggaaagttaccaaatgtagcactagaggcaagaaaaggggtgattttttaaagatttggctatacttaagatatttaaagaggatgaggttgagtcgtgagtataatttagaagctctccagtgagtatttttttagtatcaaatagtgatcttcttttgctaacataaaaatgagtaaactacagcagagaaataagaataaaactaatgaagggttttttaaaagaactaaataaaacaaataaaactaggctacaggtatagctgaccaagtttgctgtgaaaaatccttgttatatctatttctgtattggagtaatgtgtagattagtggattgttagggatttcagcagtataagaaagaatcaaatatcttgcttttgggtcttctccaaagtaaattgcatggacttcttaaagaagtttgaaatcagtaaaaagacattaggatcatgcaattttactttgtctagcttctaatgtggtaaattgcacattgtgcaacagaaccattaataaaagaaaggagttagttttgaggtaactgcattcattaggggctgaaaataaatgttaaaaatgtttaatttggttagaagttctacaacattgtatgtacatatacaaaatttcattttctctgaaagtcgagaattccaagaactgttacatataatcatatatatgcctatatctaaacgttttccctcctttaatattgataaagttaatatattttaggatgttatgtaaatatttttgcatgtatctgtagctccatcttaatcaaatttatggttaaaagagatttgaggccaggcgtggaggctcacacctataatcccaacactttgggaggccgaggtgggaggatcacttgagcacaggagtttgagaccagcctgtgcaacatcatgaaacatcatctctacataaaaaaatacatatatacaaaaattagctgggcatcatggcacacacctgtagtcccagctacttaggaggctgagatgggaggattgatcgatcgcttgagcctgggaggtggaggctactgtgagccatgatcatgccactgcactccagcctgggcaacagagtgagaccctgtctccaaagagaaagagaaacttgagaaggcttgtgcccaaagcttgaagaaagattgtaatagcatttagttgtgttttatcatgttatcttcataacatgcattttgcatatggctcagagcagagccggatctcccaaggaagcacaaatagtttttgtcgctaacttagttatgagtgaagcctctgttcacttataacttgccagtttcattggtggaataagtccccttactcatgattcatcaatattcctatattagaattccagtttgatgtttgtctctagttgtctgtgtataatatttccaaagctcctttgtaaaccccgtctcctttcattcagagagtcagagacggtatctcctcctcctgcctcttctattgttctgattagtctacttaaattcacttgatgctctttttattttacaagagacttgagaaatgttggttgttcctaatggcaaactactttagctgggaaaattcatttcaacttattttaagcttgtaaaatacactgtggtgataaaataaaagagctgggttttaaaaaaaaaaaaaaaaaaa

SEQ ID NO: 570 - DNA, 283 bp, Artificial Sequence
  Description of Artificial sequences:primer
  misc_feature (1)..(283): 3' terminal sequence from clone image:27100.
  misc_feature (81)..(81): n is a, c, g, or t
  misc_feature (194)..(194): n is a, c, g, or t
  misc_feature (209)..(209): n is a, c, g, or t
  misc_feature (227)..(227): n is a, c, g, or t
  misc_feature (240)..(240): n is a, c, g, or t
  misc_feature (272)..(272): n is a, c, g, or t
  misc_feature (277)..(277): n is a, c, g, or t
tttttttttttccattcataaaacttttattccacttacatgaatttaatacaccgtgttcttaacaattatgcttggatngttcatgaaaatttcataagacattaaacaaagctagccatcatctcaagttatttccctgttaactatttttacagcacatgcatgttaggcaagtatcaaaagcaaaaaantcacaaaggcaaaantcctaaaaaaaggttaantacatgggttttngttttactgctgtgcttgatatacatggggtnctggntaccca

SEQ ID NO: 571 - DNA, 395 bp, Artificial Sequence
  Description of Artificial sequences:primer
  misc_feature (1)..(395): 5' terminal sequence from clone image:27100.
  misc_feature (81)..(81): n is a, c, g, or t
  misc_feature (343)..(343): n is a, c, g, or t
  misc_feature (364)..(364): n is a, c, g, or t
  misc_feature (379)..(379): n is a, c, g, or t
acatggcagcctgcatgaagtctgtaactgagcaaggagctgaattatccaatgaggagaggaatcttctctcagttgctnataaaaatgttgtaggagcccgtagtcatcttggagggtcgtctcaagtattgaacaaaagacggaaggtgctgagaaaaaacagcagatggctcgagaatacagagagaaaattgagacggagctaagagatatctgcaatgatgtactgtctcttttgggaaaagttcttgatccccaatgcttcacaagcagagagcaaagtcttctattttgaaaattgaaaggagattactacccttacttgggcttgaggttgccnctgggttgattgaccaagganaggggtttgttccgntccagtccacccaacc

SEQ ID NO: 572 - DNA, 452 bp, Artificial Sequence
  Description of Artificial sequences:primer
  misc_feature (1)..(452): 3' terminal sequence from clone image:27208. asparagine synthetase(ASNS) gene.
  misc_feature (18)..(18): n is a, c, g, or t
  misc_feature (23)..(23): n is a, c, g, or t
  misc_feature (426)..(426): n is a, c, g, or t
  misc_feature (432)..(432): n is a, c, g, or t
ttttttttttttttaganttaangacttttatttttttcacacccaagttaagcctgagttgactctcattgttcccctatctacccacagtccccatccaacacgaagaaatatttgctttcacattacagcataaagaccacctaagctttgacagctgacttgtagtgggtcagcgtgcgggcagaagggtcagtggcattgatccacttgggcatccagtaatggctcagcagtcagcccggcctggggtaatggcgttcaaagacttgacggtagtaatatccttctttggttttaggagtattgaagggaaatttctggggctgcatttgcccatcattgcatcatcaaccctgatgttcaaccgtattccctgtaaaatctttaaaccagggggatttctttaacctggaaggttattnccattnacttgaagggcttcttttgg

SEQ ID NO: 573 - DNA, 385 bp, Artificial Sequence
  Description of Artificial sequences:primer
  misc_feature (1)..(385): 5' terminal sequence from clone image:27208. asparagine synthetase(ASNS) gene.
  misc_feature (372)..(372): n is a, c, g, or t
  misc_feature (377)..(377): n is a, c, g, or t
aactgtgaagaacaacctcaggatcctttttaataatgctgtaaagaaacgtttgatgacagacagaaggattggctgccttttatcagggggcttggactccagcttggttgctgccactctgttgaagcagctgaaagaagcccaagtacagtatcctctccagacatttgcaattggcatggaagacagccccgatttactggctgctagaaaggtggcagatcatattggaagtgaacattatgaagtcctttttaactctgagggaaggcattcaggctctgggatgaagtcatattttccttgggaaacttatggacattacaacagtttcgtggcttcagtagggtatgtattttaattttcccnaggtntattttcg

SEQ ID NO: 574 - DNA, 2348 bp, Artificial Sequence
  Description of Artificial sequences:primer
  misc_feature (1)..(2348): asparagine synthetase(ASNS) gene.
cctttctgtcctggttccctgaagcatcgagagggaaccgcggccggcaggccggaccgctccggagaggaggcagcggcagtttgagcccctgtaaatgttatatgtgtacttttttttactatgtggcgtcgaagcctgtggacattttcgcggtccgggtccctgcggcggacgggtcggatcgtgctcgtggccagggcgcagtcaggtgtcgcgtggtcctgatctaggaagagactgcggccttatcaccgtctcggtgtctgctttcaccttcaactgcccccctcctcacctggaccgctcaccctcctcctcccctctcaccccgccatccccaccagtccccacctgtctctgtagactgcaagactcatcaagtgacttgctgagcaaaccctgccgagaagagattttcttcaatcacatctgaataaatcacttgaagaaagcttatagcttcattgcaccatgtgtggcatttgggcgctgtttggcagtgatgattgcctttctgttcagtgtctgagtgctatgaagattgcacacagaggtccagatgcattccgttttgagaatgtcaatggatacaccaactgctgctttggatttcaccggttggcggtagttgacccgctgtttggaatgcagccaattcgagtgaagaaatatccgtatttgtggctctgttacaatggtgaaatctacaaccataagaagatgcaacagcattttgaatttgaataccagaccaaagtggatggtgagataatccttcatctttatgacaaaggaggaattgagcaaacaatttgtatgttggatggtgtgtttgcatttgttttactggatactgccaataagaaagtgttcctgggtagagatacatatggagtcagacctttgtttaaagcaatgacagaagatggatttttggctgtatgttcagaagctaaaggtcttgttacattgaagcactccgcgactccctttttaaaagtggagccttttcttcctggacactatgaagttttggatttaaagccaaatggcaaagttgcatccgtggaaatggttaaatatcatcactgtcgggatgaacccctgcacgccctctatgacaatgtggagaaactctttccaggttttgagatagaaactgtgaagaacaacctcaggatcctttttaataatgctgtaaagaaacgtttgatgacagacagaaggattggctgccttttatcagggggcttggactccagcttggttgctgccactctgttgaagcagctgaaagaagcccaagtacagtatcctctccagacatttgcaattggcatggaagacagccccgatttactggctgctagaaaggtggcagatcatattggaagtgaacattatgaagtcctttttaactctgaggaaggcattcaggctctggatgaagtcatattttccttggaaacttatgacattacaacagttcgtgcttcagtaggtatgtatttaatttccaagtatattcggaagaacacagatagcgtggtgatcttctctggagaaggatcagatgaacttacgcagggttacatatattttcacaaggctccttctcctgaaaaagccgaggaggagagtgagaggcttctgagggaactctatttgtttgatgttctccgcgcagatcgaactactgctgcccatggtcttgaactgagagtcccatttctagatcatcgattttcttcctattacttgtctctgccaccagaaatgagaattccaaagaatgggatagaaaaacatctcctgagagagacgtttgaggattccaatctgatacccaaagagattctctggcgaccaaaagaagccttcagtgatggaataacttcagttaagaattcctggtttaagattttacaggaatacgttgaacatcaggttgatgatgcaatgatggcaaatgcagcccagaaatttcccttcaatactcctaaaaccaaagaaggatattactaccgtcaagtctttgaacgccattacccaggccgggctgactggctgagccattactggatgcccaagtggatcaatgccactgacccttctgcccgcacgctgacccactacaagtcagctgtcaaagcttaggtggtctttatgctgtaatgtgaaagcaaatatttcttcgtgttggatggggactgtgggtagataggggaacaatgagagtcaactcaggctaacttgggtgtgaaaaaaataaaagtcctaaatctaaaaaaaaaaaaaaaaaaaaaaaaaaaaaaaaaaaaaaaaaaaaaaaaaaaaaaaaaaaa

SEQ ID NO: 575 - DNA, 434 bp, Artificial Sequence
  Description of Artificial sequences:primer
  misc_feature (1)..(434): 3' terminal sequence from clone image:272189. neuroblastoma ras viral (v-ras) oncogene homolog(NRAS) gene.
gtaatttgttaatatactatatttgaggtttgaaaatcactgatcacagctattaaataacaatgcaccaaagttttacaatatttgaacatctgcaaatgtagagctttctggtatgacacaaatttgaatacaaatggaagttcattgaatattaggtttatcagtaagctaggggaaacaaattacatacattgtataggtagtaacctatgaaaaaagtggagattaggtaaaaattattaagtgaaattattcatgtgctttcagtttcatctttctcctgggaaagccccaaaacaggcctctggaaaaccaatttcatacatgtacaaaatggcatctgctctcaaatagatatagctttccttcaatggtagataagtcacagacgtatctcagacattcatttcatgcataaggatttttgagac

SEQ ID NO: 576 - DNA, 326 bp, Artificial Sequence
  Description of Artificial sequences:primer
  misc_feature (1)..(326): 5' terminal sequence from clone image:272189. neuroblastoma ras viral (v-ras) oncogene homolog(NRAS) gene.
  misc_feature (218)..(218): n is a, c, g, or t
  misc_feature (254)..(254): n is a, c, g, or t
  misc_feature (295)..(295): n is a, c, g, or t
  misc_feature (303)..(303): n is a, c, g, or t
  misc_feature (311)..(311): n is a, c, g, or t
  misc_feature (325)..(325): n is a, c, g, or t
ttcttgctggtgtgaaatgactgagtacaaactggtggtggttggagcaggtggtgttgggaaaagcgcactgacaatccagctaatccagaaccactttgtagatgaatatgatcccaccatagaggattcttacagaaaacaagtggttatagatggtgaaacctgtttgttggacatactggatacagctggacaagaagagtacagtgccatgngagaccaatacatgaggacaggcgaaggcttcctcntggtgtatttgccatcaatgaatagcaagtcatttgcgggntatttaanctcttacnggggagccagattna

SEQ ID NO: 577 - DNA, 1963 bp, Artificial Sequence
  Description of Artificial sequences:primer
  misc_feature (1)..(1963): neuroblastoma ras viral (v-ras) oncogene homolog(NRAS) gene.
gaaacgtcccgtgtgggaggggcgggtctgggtgcggctgccgcatgactcgtggttcggaggcccacgtggccggggcggggactcaggcgcctggcagccgactgattacgtagcgggcggggccggaagtgccgctccttggtgggggctgttcatggcggttccggggtctccaacatttttcccggtctgtggtcctaaatctgtccaaagcagaggcagtggagcttgaggttcttgctggtgtgaaatgactgagtacaaactggtggtggttggagcaggtggtgttgggaaaagcgcactgacaatccagctaatccagaaccactttgtagatgaatatgatcccaccatagaggattcttacagaaaacaagtggttatagatggtgaaacctgtttgttggacatactggatacagctggacaagaagagtacagtgccatgagagaccaatacatgaggacaggcgaaggcttcctctgtgtatttgccatcaataatagcaagtcatttgcggatattaacctctacagggagcagattaagcgagtaaaagactcggatgatgtacctatggtgctagtgggaaacaagtgtgatttgccaacaaggacagttgatacaaaacaagcccacgaactggccaagagttacgggattccattcattgaaacctcagccaagaccagacagggtgttgaagatgctttttacacactggtaagagaaatacgccagtaccgaatgaaaaaactcaacagcagtgatgatgggactcagggttgtatgggattgccatgtgtggtgatgtaacaagatacttttaaagttttgtcagaaaagagccactttcaagctgcactgacaccctggtcctgacttcctggaggagaagtattcctgttgctgtcttcagtctcacagagaagctcctgctacttccccagctctcagtagtttagtacaataatctctatttgagaagttctcagaataactacctcctcacttggctgtctgaccagagaatgcacctcttgttactccctgttatttttctgccctgggttcttccacagcacaaacacacctcaacacacctctgccaccccaggtttttcatctgaaaagcagttcatgtctgaaacagagaaccaaaccgcaaacgtgaaattctattgaaaacagtgtcttgagctctaaagtagcaactgctggtgattttttttttctttttactgttgaacttagaactatgcctaatttttggagaaatgtcataaattactgttttgccaagaatatagttattattgctgtttggtttgtttataatgttatcggctctattctctaaactggcatctgctctagattcataaatacaaaaatgaatactgaattttgagtctatcctagtcttcacaactttgacgtaattaaatccaacttttcacagtgaagtgcctttttcctagaagtggtttgtagactcctttataatatttcagtggaatagatgtctcaaaaatccttatgcatgaaatgaatgtctgagatacgtctgtgacttatctaccattgaaggaaagctatatctatttgagagcagatgccattttgtacatgtatgaaattggttttccagaggcctgttttggggctttcccaggagaaagatgaaactgaaagcatatgaataatttcacttaataatttttacctaatctccacttttttcataggttactacctatacaatgtatgtaatttgtttcccctagcttactgataaacctaatattcaatgaacttccatttgtattcaaatttgtgtcataccagaaagctctacatttgcagatgttcaaatattgtaaaactttggtgcattgttatttaatagctgtgatcagtgattttcaaacctcaaatatagtatattaacaaatt

SEQ ID NO: 578 - DNA, 242 bp, Artificial Sequence
  Description of Artificial sequences:primer
  misc_feature (1)..(242): 3' terminal sequence from clone image:27237. mortality factor 4 like 1(MORF4L1) gene.
  misc_feature (11)..(11): n is a, c, g, or t
  misc_feature (166)..(166): n is a, c, g, or t
  misc_feature (178)..(178): n is a, c, g, or t
  misc_feature (183)..(183): n is a, c, g, or t
  misc_feature (197)..(197): n is a, c, g, or t
  misc_feature (203)..(203): n is a, c, g, or t
  misc_feature (234)..(234): n is a, c, g, or t
ttttttttganatttaaagaaaaaatttattgaagatctgaaaaacaattcctaaaagattgacttttccagaaaactagctacacaatgcattgcgtctatcatgttaaaacgtgcattagacacaaatacaaaaaccatgaaacaagccaccattcttcaacantttgagccaagntaaantgcctaagtaacancatggntgacttgcaaaggatgggctctttactttangcaccata

SEQ ID NO: 579 - DNA, 1766 bp, Artificial Sequence
  Description of Artificial sequences:primer
  misc_feature (1)..(1766): mortality factor 4 like 1(MORF4L1) gene.
ggcaaatccggcccaggatgtagagctggcagtgcctgacggcgcgtctgacgcggagttgggtggggtagagagtagggggcggtagtcgggggtggtgggagaaggaggaggcggcgaatcacttataaatggcgccgaagcaggacccgaagcctaaattccaggagggtgagcgagtgctgtgctttcatgggcctcttctttatgaagcaaagtgtgtaaaggttgccataaaggacaaacaagtgaaatacttcatacattacagtggttggaataaaaattgggatgaatgggttccggagagcagagtactcaaatacgtggacaccaatttgcagaaacagcgagaacttcaaaaagccaatcaggagcagtatgcagaggggaagatgagaggggctgccccaggaaagaagacatctggtctgcaacagaaaaatgttgaagtgaaaacgaaaaagaacaaacagaaaacacctggaaatggagatggtggcagtaccagtgagacccctcagcctcctcggaagaaaagggcccgggtagatcctactgttgaaaatgaggaaacattcatgaacagagttgaagttaaagtaaagattcctgaagagctaaaaccgtggcttgttgatgactgggacttaattaccaggcaaaaacagctcttttatcttcctgccaagaagaatgtggattccattcttgaggattatgcaaattacaagaaatctcgtggaaacacagataataaggagtatgcggttaatgaagttgtggcagggataaaagaatacttcaacgtaatgttgggtacccagctactctataaatttgagagaccacagtatgctgaaattcttgcagatcatcccgatgcacccatgtcccaggtgtatggagcgccacatctcctgagattatttgtacgaattggagcaatgttggcttatacacctctggatgagaagagccttgctttattactcaattatcttcacgatttcctaaagtacctggcaaagaattctgcaactttgttcagtgccagcgattatgaagtggctcctcctgagtaccatcggaaagctgtgtgagaggcactctcactcacttatgtttggatctccgtaaacacatttttgttcttagtctatctcttgtacaaacgatgtgctttgaagatgttagtgtataacaattgatgtttgttttctgtttgattttaaacagagaaaaaataaaagggggtaatagctccttttttcttctttctttttttttttcatttcaaaattgctgccagtgttttcaatgatggacaacagagggatatgctgtagagtgttttattgcctagttgacaaagctgcttttgaatgctggtggttctattcctttgacactacgcacttttataatacatgttaatgctatatgacaaaatgctctgattcctagtgccaaaggttcaattcagtgtatataactgaacacactcatccatttgtgcttttgtttttttttatggtgcttaaagtaaagagcccatcctttgcaagtcatccatgttgttacttaggcattttatcttggctcaaattgttgaagaatggtggcttgtttcatggtttttgtatttgtgtctaatgcacgttttaacatgatagacgcaatgcattgtgtagctagttttctggaaaagtcaatcttttaggaattgtttttcagatcttcaataaattttttctttaaatttc

SEQ ID NO: 580 - DNA, 479 bp, Artificial Sequence
  Description of Artificial sequences:primer
  misc_feature (1)..(479): 3' terminal sequence from clone image:272502. chaperonin containing tcp1, subunit 4 (delta)(CCT4) gene.
  misc_feature (371)..(371): n is a, c, g, or t
acgcttcttttattagtttttattagtttttcaaaagtatcagaaataacagaatgttgggagaagataaatctgccttttgaaaccaaatatttaatattttcattaaattgtttcaatacaacttcaggcaaatgccaactggaagaccaagcccagaaattcagaggaaataatcttccaaacaaggaacaccaaggtgatcttcttccattccagccacaatactggtgatcataatggtgctagtcagttatccagattatcgagtgtttaccacatcatctattttcagaatgctccgaacagtttcagttgcaagagtcagagcactgactgataccaacagaggctggacaaccagttcctcnaaaatgttgggaaataccaccctttcggacattaatgcctgcagttttttctccctgggcatgccggtttcttagttctgttactgtagaaatgggattcaggccggc

SEQ ID NO: 581 - DNA, 331 bp, Artificial Sequence
  Description of Artificial sequences:primer
  misc_feature (1)..(331): 3' terminal sequence from clone image:27326. williams beuren syndrome chromosome region 22(WBSCR22) gene.
  misc_feature (47)..(47): n is a, c, g, or t
  misc_feature (79)..(79): n is a, c, g, or t
  misc_feature (288)..(288): n is a, c, g, or t
  misc_feature (301)..(301): n is a, c, g, or t
tttttttttttctccctggaaaggaagtttcattatgttgcccaggnaggtctcaaactcctggcctcaaatgatcctnccacctcagcctcccaaggtgctgggattacaggtgtgagccaccacgcccggcccagagaactttttttttactgcagaaaacatttttataactttagaacttttctaaaatactactttgtcagctgaacaatatagaaaagtgcagaggcaagtgctttccagaaccgcgtggtgacttagaagcggggcttgcgctttcggccnggtgtactgggtntcaggtctgacttccctgccctgggggcct

SEQ ID NO: 582 - DNA, 435 bp, Artificial Sequence
  Description of Artificial sequences:primer
  misc_feature (1)..(435): 5' terminal sequence from clone image:27326. williams beuren syndrome chromosome region 22(WBSCR22) gene.
  misc_feature (414)..(414): n is a, c, g, or t
  misc_feature (428)..(428): n is a, c, g, or t
ctgctgaggcgtggtaatggcgtccccggccggcgtccgagcatggcgcacccccagagctgttttatgacgagacagaagcccggaaatacgttcgcaactcacggatgattgatatccagaccaggatggctgggcgagcattggagcttctttatctgccagagaataagccctgttacctgctggatattggctgtggcactgggctgagtggaagttatctgtcagatgaagggcactattgggtgggcctggatatcagccctgccatgctggatgaggctgtggaccgagagatagagggagacctgctgctgggggatatgggccagggcatcccatttcaagccaggcacattttgatggtttgcatcagcattttctgctgtgcattgggctcttgttaatgcntaaacaagaagttntgaaaac

SEQ ID NO: 583 - DNA, 1258 bp, Artificial Sequence
  Description of Artificial sequences:primer
  misc_feature (1)..(1258): williams beuren syndrome chromosome region 22(WBSCR22) gene.
gacataaaaaccgggtgccggcaggcgccagtcgcaggtgtgctgctgaggcgtgagaatggcgtcccgcggccggcgtccggagcatggcggacccccagagctgttttatgacgagacagaagcccggaaatacgttcgcaactcacggatgattgatatccagaccaggatggctgggcgagcattggagcttctttatctgccagagaataagccctgttacctgctggatattggctgtggcactgggctgagtggaagttatctgtcagatgaagggcactattgggtgggcctggatatcagccctgccatgctggatgaggctgtggaccgagagatagagggagacctgctgctgggggatatgggccagggcatcccattcaagccaggcacatttgatggttgcatcagcatttctgctgtgcagtggctctgtaatgctaacaagaagtctgaaaaccctgccaagcgcctgtactgcttttttgcttctcttttttctgttctcgtccggggatcccgagctgtcctgcagctgtaccctgagaactcagagcagttggagctgatcacaacccaggccacaaaggcaggcttctccggtggcatggtggtagactaccctaacagtgccaaagcaaagaaattctacctctgcttgttttctgggccttcgacctttataccagaggggctgagtgaaaatcaggatgaagttgaacccagggagtctgtgttcaccaatgagaggttcccattaaggatgtcgaggcggggaatggtgaggaagagtcgggcatgggtgctggagaagaaggagcggcacaggcgccagggcagggaagtcagacctgacacccagtacaccggccgcaagcgcaagccccgcttctaagtcaccacgcggttctggaaaggcacttgcctctgcacttttctatattgttcagctgacaaagtagtattttagaaaagttctaaagttataaaaatgttttctgcagtaaaaaaaaagttctctgggccgggcgtggtggctcacacctgtaatcccagcaccttgggaggctgaggtgggaggatcatttgaggccaggagtttgagacctgcctgggcaacataatgaaacttcctttccagggaggaaaaaaaaaaaaaaaaaaagctctgagagcatcttattttgtttaaaggcaagaaataaaatttccttttgtggaaaaaaaaaaaaaaaaaaaaaaaaaaaaa

SEQ ID NO: 584 - DNA, 505 bp, Artificial Sequence
  Description of Artificial sequences:primer
  misc_feature (1)..(505): 3' terminal sequence from clone image:274315. glucosamine (n-acetyl)-6-sulfatase (sanfilippo disease iiid)(GNS) gene.
  misc_feature (1)..(1): n is a, c, g, or t
  misc_feature (3)..(3): n is a, c, g, or t
  misc_feature (313)..(313): n is a, c, g, or t
  misc_feature (432)..(432): n is a, c, g, or t
  misc_feature (449)..(449): n is a, c, g, or t
  misc_feature (473)..(473): n is a, c, g, or t
  misc_feature (503)..(503): n is a, c, g, or t
nangttttacaaattcagtctttaaccacaagaggaataatcaagaactgtggccccaggataaaaagaatacagtgagaacaaagacctcaggagtgtccttgtcagctaaaggaagagaccagagacagccactcctgacacatgggcagagttcacagtttaacacattgcacgaggaagtcagctgactgggttgctttttcaaacaggacttaaagccagcccagaaactcttccagggtgtggtcttgaagactaggctacagacacctactacaatcacttcatcagaaagagggcgtgcaggggntccatctgcagaggctgtgtgagggtcgctacaggaagatgtttgggaaaatcttcgagtcctgacactgccgcgattgctggaacatgagacgggggtcaaacccgttttcccgggtnaaaaaccctgggggttncgacaggtttggcccaggacaggntttttaacatcctttaaccgtaggttcatntt

SEQ ID NO: 585 - DNA, 420 bp, Artificial Sequence
  Description of Artificial sequences:primer
  misc_feature (1)..(420): 5' terminal sequence from clone image:274315. glucosamine (n-acetyl)-6-sulfatase (sanfilippo disease iiid)(GNS) gene.
  misc_feature (371)..(371): n is a, c, g, or t
  misc_feature (388)..(388): n is a, c, g, or t
  misc_feature (398)..(398): n is a, c, g, or t
  misc_feature (403)..(403): n is a, c, g, or t
aagatgcttataacaatacctatgcctgtgtgaggacaatgtcagcattgtggaatttgcagtattgcgagtttgatgaccaggaggtgtttgtagaagtctataatctgactgcagacccagaccagatcactaacattgctaaaaccatagacccagagcttttaggaaagatgaactatcggttaatgatgttacagtcctgttctgggccaacctgtcgcactccaggggtttttgaccccggatacaggtttgacccccgtctcatgttcagcaatcgcggcagtgtcaggactcgaagattttccaaacatcttctgtagcgacctcacacagcctctgcagatggatccctgcacgcctctttnctgatgaagtgattgtnagtaggtgtnctgtnagctagtctttcaagac

SEQ ID NO: 586 - DNA, 2379 bp, Artificial Sequence
  Description of Artificial sequences:primer
  misc_feature (1)..(2379): glucosamine (n-acetyl)-6-sulfatase (sanfilippo disease iiid)(GNS) gene.
ggaattccggtcggcctctcgcccttcagctacctgtgcgtccctccgtcccgtcccgtcccggggtcaccccggagcctgtccgctatgcggctcctgcctctagccccaggtcggctccggcggggcagcccccgccacctgccctcctgcagcccagcgctgctactgctggtgctgggcggctgcctgggggtcttcggggtggctgcgggaacccggaggcccaacgtggtgctgctcctcacggacgaccaggacgaagtgctcggcggcatgacaccactaaagaaaaccaaagctctcatcggagagatggggatgactttttccagtgcttatgtgccaagtgctctctgctgccccagcagagccagtatcctgacaggaaagtacccacataatcatcacgttgtgaacaacactctggaggggaactgcagtagtaagtcctggcagaagatccaagaaccaaatactttcccagcaattctcagatcaatgtgtggttatcagaccttttttgcagggaaatatttaaatgagtacggagccccagatgcaggtggactagaacacgttcctctgggttggagttactggtatgccttggaaaagaattctaagtattataattacaccctgtctatcaatgggaaggcacggaagcatggtgaaaactatagtgtggactacctgacagatgttttggctaatgtctccttggactttctggactacaagtccaactttgagcccttcttcatgatgatcgccactccagcgcctcattcgccttggacagctgcacctcagtaccagaaggctttccagaatgtctttgcaccaagaaacaagaacttcaacatccatggaacgaacaagcactggttaattaggcaagccaagactccaatgactaattcttcaatacagtttttagataatgcatttaggaaaaggtggcaaactctcctctcagttgatgaccttgtggagaaactggtcaagaggctggagttcactggggagctcaacaacacttacatcttctatacctcagacaatggctatcacacaggacagttttccttgccaatagacaagagacagctgtatgagtttgatatcaaagttccactgttggttcgaggacctgggatcaaaccaaatcagacaagcaagatgctggttgccaacattgacttgggtcctactattttggacattgctggctacgacctaaataagacacagatggatgggatgtccttattgcccattttgagaggtgccagtaacttgacctggcgatcagatgtcctggtggaataccaaggagaaggccgtaacgtcactgacccaacatgcccttccctgagtcctggcgtatctcaatgcttcccagactgtgtatgtgaagatgcttataacaatacctatgcctgtgtgaggacaatgtcagcattgtggaatttgcagtattgcgagtttgatgaccaggaggtgtttgtagaagtctataatctgactgcagacccagaccagatcactaacattgctaaaaccatagacccagagcttttaggaaagatgaactatcggttaatgatgttacagtcctgttctgggccaacctgtcgcactccaggggtttttgaccccggatacaggtttgacccccgtctcatgttcagcaatcgcggcagtgtcaggactcgaagattttccaaacatcttctgtagcgacctcacacagcctctgcagatggatccctgcacgcctctttctgatgaagtgattgtagtaggtgtctgtagctagtcttcaagaccacacctggaagagtttctgggctggctttaagtcctgtttgaaaaagcaacccagtcagctgacttcctcgtgcaatgtgttaaactgtgaactctgcccatgtgtcaggagtggctgtctctggtctcttcctttagctgacaaggacactcctgaggtctttgttctcactgtattttttttatcctggggccacagttcttgattattcctcttgtggttaaagactgaatttgtaaacccattcagataaatggcagtactttaggacacacacaaacacacagatacaccttttgatatgtaagcttgacctaaagtcaaaggacctgtgtagcatttcagattgagcacttcactatcaaaaatactaacatcacatggcttgaagagtaaccatcagagctgaatcatccaagtaagaacaagtaccattgttgattgataagtagagatacattttttatgatgttcatcacagtgtggtaaggttgcaaattcaaaacatgtcacccaagctctgttcatgtttttgtgaattc

SEQ ID NO: 587 - DNA, 294 bp, Artificial Sequence
  Description of Artificial sequences:primer
  misc_feature (1)..(294): 3' terminal sequence from clone image:27506. solute carrier family 17 (sodium-dependent inorganic phosphate cotransporter), member 7(SLC17A7) gene.
  misc_feature (165)..(165): n is a, c, g, or t
  misc_feature (195)..(195): n is a, c, g, or t
  misc_feature (199)..(199): n is a, c, g, or t
  misc_feature (258)..(258): n is a, c, g, or t
  misc_feature (267)..(267): n is a, c, g, or t
ttttttttttttttttatacaccaaagcttttattgggagtggggcagggcagggatttacagtcacagagacagagacacaaagacacaaccctgcactgggaaaaaacacccctgtctcctgccccattccctttcatgggattctgtgacttctctataggntccccaaattctaagctggaaagaggggtntctnagaggggaagggatcccagattttgagtcattaagcccctgagggacacaacaaatggnccactgagnaaacagggtagttcggaaaccacccgg

SEQ ID NO: 588 - DNA, 2366 bp, Artificial Sequence
  Description of Artificial sequences:primer
  misc_feature (1)..(2366): solute carrier family 17 (sodium-dependent inorganic phosphate cotransporter), member 7(SLC17A7) gene.
ccggcggcaggagccgccaccatggagttccgccaggaggagtttcggaagctagcgggtcgtgctctcgggaagctgcaccgccttctggagaagcggcaggaaggcgcggagacgctggagctgagtgcggatgggcgcccggtgaccacgcagacccgggacccgccggtggtggactgcacctgcttcggcctccctcgccgctacattatcgccatcatgagtggtctgggcttctgcatcagctttggcatccgctgcaacctgggcgtggccatcgtctccatggtcaataacagcacgacccaccgcgggggccacgtggtggtgcagaaagcccagttcagctgggatccagagactgtcggcctcatacacggctcctttttctggggctacattgtcactcagattccaggaggatttatctgtcaaaaatttgcagccaacagagttttcggctttgctattgtggcaacatccactctaaacatgctgatcccctcagctgcccgcgtccactatggctgtgtcatcttcgtgaggatcctgcaggggttggtagagggggtcacataccccgcctgccatgggatctggagcaaatgggccccacccttagaacggagtcgcctggcgacgacagccttttgtggttcctatgctggggcggtggtcgcgatgcccctcgccggggtccttgtgcagtactcaggatggagctctgttttctacgtctacggcagcttcgggatcttctggtacctgttctggctgctcgtctcctacgagtcccccgcgctgcaccccagcatctcggaggaggagcgcaagtacatcgaggacgccatcggagagagcgcgaaactcatgaaccccctcacgaagtttagcactccctggcggcgcttcttcacgtctatgccagtctatgccatcatcgtggccaacttctgccgcagctggacgttctacctgctgctcatctcccagcccgcctacttcgaagaagtgttcggcttcgagatcagcaaggtaggcctggtgtccgcgctgccccacctggtcatgaccatcatcgtgcccatcggcggccagatcgcggacttcctgcggagccgccgcatcatgtccaccaccaacgtgcgcaagttgatgaactgcggaggcttcggcatggaagccacgctgctgttggtggtcggctactcgcactccaagggcgtggccatctccttcctggtcctagccgtgggcttcagcggcttcgccatctctgggttcaacgtgaaccacctggacatagccccgcgctacgccagcatcctcatgggcatctccaacggcgtgggcacactgtcgggcatggtgtgccccatcatcgtgggggccatgactaagcacaagactcgggaggagtggcagtacgtgttcctaattgcctccctggtgcactatggaggtgtcatcttctacggggtctttgcttctggagagaagcagccgtgggcagagcctgaggagatgagcgaggagaagtgtggcttcgttggccatgaccagctggctggcagtgacgacagcgaaatggaggatgaggctgagcccccgggggcaccccctgcacccccgccctcctatggggccacacacagcacatttcagccccccaggcccccaccccctgtccgggactactgaccatgtgcctcccactgaatggcagtttccaggacctccattccactcatctctggcctgagtgacagtgtcaaggaaccctgctcctctctgtcctgcctcaggcctaagaagcactctcccttgttcccagtgctgtcaaatcctctttccttcccaattgcctctcaggggtagtgaagctgcagactgacagtttcaaggatacccaaattcccctaaaggttccctctccacccgttctgcctcagtggtttcaaatctctcctttcagggctttatttgaatggacagttcgacctcttactctctcttgtggttttgaggcacccacaccccccgctttcctttatctccagggactctcaggctaacctttgagatcactcagctcccatctcctttcagaaaaattcaaggtcctcctctagaagtttcaaatctctcccaactctgttctgcatcttccagattggtttaaccaattactcgtccccgccattccagggattgattctcaccagcgtttctgatggaaaatggcggtttcaagtccccgattccgtgcccacttcacatctcccctaccagcagattctgcgaaagcaccaaatttctcaagaccctcttctccctagcttagcataatgtctggggaaaca

SEQ ID NO: 589 - DNA, 429 bp, Artificial Sequence
  Description of Artificial sequences:primer
  misc_feature (1)..(429): 3' terminal sequence from clone image:27599. ras homolog gene family, member t2(ARHT2) gene.
  misc_feature (242)..(242): n is a, c, g, or t
  misc_feature (322)..(322): n is a, c, g, or t
  misc_feature (405)..(405): n is a, c, g, or t
  misc_feature (410)..(410): n is a, c, g, or t
ttttttttttttttccgagatagaaaacacacagtgaagtttaatcaggaacccaacctccggtcctctgctacaaccacggaaacggctccaaacttgaggggggacccccaaacgcctgcttttggcccaaagctctgccttccagccctcctcatacccactgggccacctaggaccaggataggggggtagagccctgagaattctgggtctggggtcaccagctcccacacctgtgnttccccgggccccacacacatgatgcccaggggtgggcaattccctgacagcggtggccggcacttgggagttcctgttnagccacctgccacggcccacctgggggttccggcagagcaggggcagttgcattggcagcataaggggccgttgcagattcgnattgntttagaaacaaaaagttcc

SEQ ID NO: 590 - DNA, 381 bp, Artificial Sequence
  Description of Artificial sequences:primer
  misc_feature (1)..(381): 5' terminal sequence from clone image:27599. ras homolog gene family, member t2(ARHT2) gene.
  misc_feature (73)..(73): n is a, c, g, or t
  misc_feature (377)..(377): n is a, c, g, or t
cacctggaccatcctgcggcgcttcggctacagcgatgccctggagctgactgcggactatctctcccctctnatccacgtgccccccggctgcagcacggagctcaaccaccttggctaccagtttgtgcagagagtgtttgagaagcacgaccaggaccgcgacggcgccctctcgcccgtggagctgcaaagccttttcagtgtgttcccagcagcgccctggggccccgagctcccacgcacagtccgcacagaggccggccggttgcccctgcacggatacctcttgccagtgggaccctgggtgacctacctgggacgtccggagcttgccttgggacaccttagggttacctgggggttaccccaccctnttgt

SEQ ID NO: 591 - DNA, 2509 bp, Artificial Sequence
  Description of Artificial sequences:primer
  misc_feature (1)..(2509): ras homolog gene family, member t2(ARHT2) gene.
gagcgaaaggcttgaggaccaggtcggggccgggttccgggtcggggagcggctccgggcggcagctatgaggcgggacgtgcgcatcctgttactgggcgaggcccaggtggggaagacgtcgctgatcctgtccctggtgggcgaggagttccccgaggaggtccctccccgcgcggaggagatcacgatccccgcggacgtcaccccggagaaggtgcccacccacatcgtggactactcagaagccgagcagacggacgaggagctgcgggaggagatccacaaggcaaacgtggtgtgtgtggtgtatgacgtctctgaggaggccaccattgagaagattcgaactaagtggatcccactggtgaatggggggaccacgcaggggcccagggtgcccatcatcctagtgggcaacaagtcagacctgcggtcggggagctccatggaggccgtgctccccatcatgagccagtttcccgagattgagacctgcgtggagtgttcggccaagaacctgaggaacatctcagagctgttctactacgcccagaaggccgtcctgcatcccacagcccccctctatgaccctgaggccaagcagttgaggcccgcgtgcgcccaggcgctgacgcgcatcttcaggctctcagatcaggacctggaccaggcgctcagtgacgaagagctcaacgctttccagaaatcctgctttgggcaccccctggccccgcaggccctggaggacgtgaagacggtggtgtgcaggaacgtggcgggcggcgtgcgggaggaccggctgaccctggatggtttcctcttcctgaacacgctcttcatccagcgcggccggcacgagaccacctggaccatcctgcggcgcttcggctacagcgatgccctggagctgactgcggactatctctcccctctgatccacgtgccccccggctgcagcacggagctcaaccaccttggctaccagtttgtgcagagagtgtttgagaagcacgaccaggaccgcgacggcgccctctcgcccgtggagctgcaaagccttttcagtgtgttcccagcagcgccctggggccccgagctcccacgcacagtccgcacagaggccggccggttgcccctgcacggatacctctgccagtggaccctggtgacctacctggacgtccggagctgccttggacacctaggctacctgggctaccccaccctctgtgagcaggaccaggcccatgccatcacagtcactcgtgagaagaggctggaccaggagaagggacagacgcagcggagcgtcctcctgtgcaaggtggtaggggcccgtggagtgggcaagtctgccttcctgcaggcttttctcggccgcggcctggggcaccaggacacgagggagcagcctcccggctacgccatcgacacggtgcaggtcaatggacaggagaagtacttgatcctctgtgaggtgggcacagatggtctgctggccacatcgctggacgccacctgtgacgttgcctgcttgatgtttgatggcagtgacccaaagtcctttgcacattgtgccagcgtctacaagcaccattacatggacgggcagaccccctgcctctttgtctcctccaaggccgacctgcccgaaggtgtcgcggtgtctggcccatcaccggccgagttttgccgcaagcaccggctacccgctcccgtgccgttctcctgtgctggcccagccgagcccagcaccaccatcttcacccagctcgccaccatggccgccttcccacatttggtccacgcagagctgcatccctcttccttctggctccgggggctgctgggggttgtcggggccgccgtggccgcagtcctcagcttctcactctacagggtcctggtgaagagccagtgaggcccctggtacccaagccccctcccctgacctgggtgtgcctcgctgctggggctctgcaggggcagcacagctggggtgcaggccaggctgccactccgggaacgcctttgcgccgggactttttgtttctgaaggcagtcgatctgcagcggggccttatgctgccatgcactgccctggctcctgccggacccccagggtgggccgtggcaggtggctgagcaggagctcccaagtgccggccaccgctgtcagggattgcccacccctgggcatcatgtgtgtggggccggggagcacaggtgtgggagctggtgaccccagacccagaattctcagggctctacccccctttcctggtcctaggtggccagtgggtatgaggagggctggaaggcagagctttgggccaaaagcaggcgttggggggtcccccctcaagtttggagccgtttccgtggttgtagcagaggaccggaggttgggttcctgattaaacttcactgtgtgttttctatctcggatcccagtctctgaagacaacttgctttgattcaacctaaaaaaaaaaaaaaaaaaaaa

SEQ ID NO: 592 - DNA, 477 bp, Artificial Sequence
  Description of Artificial sequences:primer
  misc_feature (1)..(477): 3' terminal sequence from clone image:277339. tumor protein p53 binding protein, 2(TP53BP2) gene.
  misc_feature (342)..(342): n is a, c, g, or t
  misc_feature (374)..(374): n is a, c, g, or t
ccaaaatatatgttgcctttatttcactttatgacaagtttgatttttaggaaaacttggaccatttgggttcttaaactgatccttcacttctcttgatcatgttgttaggagaggggggtctgtttacttatttgcaaggatacaccatcaatctataagtactaaagccttaatagagggtcttttgatggtcaaagtcattaacaccactaggtcagatgctgcaacactgtcttttgtaattgaagaagtccctgacaatagctgtttctaagcatacaaacagaagctgtattatctgtgaccaaggctgttgtattttcaaggcccaagactatnggataacacaagattttttccaaacaaaaatnacttattgaattataccctgggagatacagaataaatgaatgcagtaatcaatacatttagttctacttgtcacataccataaagaaattgggagcactgagt

SEQ ID NO: 593 - DNA, 154 bp, Artificial Sequence
  Description of Artificial sequences:primer
  misc_feature (1)..(154): 5' terminal sequence from clone image:277339. tumor protein p53 binding protein, 2(TP53BP2) gene.
  misc_feature (28)..(28): n is a, c, g, or t
  misc_feature (146)..(146): n is a, c, g, or t
ctgcattacattgtgctgcctcatgtancaacgtccaagtgtgtaagtttttggtggagtcaggagccgctgtgtttgccatgacctacagtgacatgcagactgctgcagataagtgcgaggaaatggaggaaggctacactcantgctccca

SEQ ID NO: 594 - DNA, 4534 bp, Artificial Sequence
  Description of Artificial sequences:primer
  misc_feature (1)..(4534): tumor protein p53 binding protein, 2(TP53BP2) gene.
gtcacgagcgtcgaagagacaaagccgcgtcagggggcccggccggggcgggggagcccggggcttgttggtgccccagcccgcgcggagggcccttcggacccgcgcgccgccgctgccgccgccgccgcctcgcaacaggtccgggcggcctcgctctccgctcccctcccccgcatccgcgaccctccggggcacctcagctcggccggggccgcagtctggccacccgcttccatgcggttcgggtccaagatgatgccgatgtttcttaccgtgtatctcagtaacaatgagcagcacttcacagaagttccagttactccagaaacaatatgcagagacgtggtggatctgtgcaaagaacccggcgagagtgattgccatttggctgaagtgtggtgtggctctgtagagatagagtttcatcatgttggccaggatggtctcgatctcctgaccttgtgatccgcctgcctcggcctcccaaagtgctggattacaggtgtgagccaccacgatcagcctctagtgtttaaaaaagaacgtccagttgcggataatgagcgaatgtttgatgttcttcaacgatttggaagtcagaggaacgaagttcgcttcttccttcgtcatgaacgcccccctggcagggacattgtgagtggaccaagatctcaggatccaagtttaaaaagaaatggtgtaaaagttcctggtgaatatcgaagaaaggagaacggtgttaatagtcctaggatggatctgactcttgctgaacttcaggaaatggcatctcgccagcagcaacagattgaagcccagcaacaattgctggcaactaaggaacagcgcttaaagtttttgaaacaacaagatcagcgacaacagcaacaagttgctgagcaggagaaacttaaaaggctaaaagaaatagctgagaatcaggaagctaagctaaaaaaagtgagagcacttaaaggccacgtggaacagaagagactaagcaatgggaaacttgtggaggaaattgaacagatgaataatttgttccagcaaaaacagagggagctcgtcctggctgtgtcaaaagtagaagaactgaccaggcagctagagatgctcaagaacggcaggatcgacagccaccatgacaatcagtctgcagtggctgagcttgatcgcctctataaggagctgcagctaagaaacaaattgaatcaagagcagaatgccaagctacaacaacagagggagtgtttgaataagcgtaattcagaagtggcagtcatggataagcgtgttaatgagctgagggaccggctgtggaagaagaaggcagctctacagcaaaaagaaaatctaccagtttcatctgatggaaatcttccccagcaagccgcgtcagccccaagccgtgtggctgcagtaggtccctatatccagtcatctactatgcctcggatgccctcaaggcctgaattgctggtgaagccagccctgccggatggttccttggtcattcaggcttcagaggggccgatgaaaatacagacactgcccaacatgagatctggggctgcttcacaaactaaaggctctaaaatccatccagttggccctgattggagtccttcaaatgcagatcttttcccaagccaaggctctgcttctgtacctcaaagcactgggaatgctctggatcaagttgatgatggagaggttccgctgagggagaaagagaagaaagtgcgtccgttctcaatgtttgatgcagtagaccagtccaatgccccaccttcctttggtactctgaggaagaaccagagcagtgaagatatcttgcgggatgctcaggttgcaaataaaaatgtggctaaagtaccacctcctgttcctacaaaaccaaaacagattaatttgccttattttggacaaactaatcagccaccttcagacattaagccagacggaagttctcagcagttgtcaacagttgttccgtccatgggaactaaaccaaaaccagcagggcagcagccgagagtgctgctatctcccagcataccttcggttggccaagaccagaccctttctccaggttctaagcaagaaagtccacctgctgctgccgtccggccctttactccccagccttccaaagacaccttacttccacccttcagaaaaccccagaccgtggcagcaagttcaatatattccatgtatacgcaacagcaggcgccaggaaaaaacttccagcaggctgtgcagagcgcgttgaccaagactcataccagagggccacacttttcaagtgtatatggtaagcctgtaattgctgctgcccagaatcaacagcagcacccagagaacatttattccaatagccagggcaagcctggcagtccagaacctgaaacagagcctgtttcttcagttcaggagaaccatgaaaacgaaagaattcctcggccactcagcccaactaaattactgcctttcttatctaatccttaccgaaaccagagtgatgctgacctagaagccttacgaaagaaactgtctaacgcaccaaggcctctaaagaaacgtagttctattacagagccagagggtcctaatgggccaaatattcagaagcttttatatcagaggaccaccatagcggccatggagaccatctctgtcccatcatacccatccaagtcagcttctgtgactgccagctcagaaagcccagtagaaatccagaatccatatttacatgtggagcccgaaaaggaggtggtctctctggttcctgaatcattgtccccagaggatgtggggaatgccagtacagagaacagtgacatgccagctccttctccaggccttgattatgagcctgagggagtcccagacaacagcccaaatctccagaataacccagaagaaccaaatccagaggctccacatgtgcttgatgtgtacctggaggagtaccctccatacccacccccaccatacccatctggggagcctgaagggcccggagaagactcggtgagcatgcgcccgcctgaaatcaccgggcaggtctctctgcctcctggtaaaaggacaaacttgcgtaaaactggctcagagcgtatcgctcatggaatgagggtgaaattcaacccccttgctttactgctagattcgtctttggagggagaatttgaccttgtacagagaattatttatgaggttgatgacccaagcctgcccaatgatgaaggcatcacggctcttcacaatgctgtgtgtgcaggccacacagaaatcgttaagttcctggtacagtttggtgtaaatgtaaatgctgctgatagtgatggatggactccattacattgtgctgcctcatgtaacaacgtccaagtgtgtaagtttttggtggagtcaggagccgctgtgtttgccatgacctacagtgacatgcagactgctgcagataagtgcgaggaaatggaggaaggctacactcagtgctcccaatttctttatggagttcaggagaagatgggcataatgaataaaggagtcatttatgcgctttgggattatgaacctcagaatgatgatgagctgcccatgaaagaaggagactgcatgacaatcatccacagggaagacgaagatgaaatcgaatggtggtgggcgcgccttaatgataaggagggatatgttccacgtaacttgctgggactgtacccaagaattaaaccaagacaaaggagcttggcctgaaacttccacacagaattttagtcaatgaagaattaatctctgttaagaagaagtaatacgattatttttggcaaaaatttcacaagacttattttaatgacaatgtagcttgaaagcgatgaagaatgtctctagaagagaatgaaggattgaagaattcaccattagaggacatttagcgtgatgaaataaagcatctacgtcagcaggccatactgtgttggggcaaaggtgtcccgtgtagcactcagataagtatacagcgacaatcctgttttctacaagaatcctgtctagtaaataggatcatttattgggcagttgggaaatcagctctctgtcctgttgagtgttttcagcagctgctcctaaaccagtcctcctgccagaaaggaccagtgccgtcacatcgctgtctctgattgtccccggcaccagcaggccttggggctcactgaaggctcgaaggcactgcacaccttgtatattgtcagtgaagaacgttagttggttgtcagtgaacaataactttattatatgagtttttgtagcatcttaagaattatacatatgtttgaaatattgaaactaagctacagtaccagtaattagatgtagaatcttgtttgtaggctgaattttaatctgtatttattgtcttttgtatctcagaaattagaaacttgctacagacttacccgtaatatttgtcaagatcatagctgactttaaaaacagttgtaataaactttttgatgct

SEQ ID NO: 595 - DNA, 455 bp, Artificial Sequence
  Description of Artificial sequences:primer
  misc_feature (1)..(455): 3' terminal sequence from clone image:277740. cysteine conjugate-beta lyase, cytoplasmic (glutamine transaminase k, kyneurenine aminotransferase)(CCBL1) gene.
aaggatcttaataacttaaacattttattatggacgaaaaggagaggcttgaggactcaagctaaaaggcaactccccaaggccaagatgagccagggaaggtgaggttatacctgagccttagcaggggccatgcagagtcgggatgtgatcggtacatggtggaagtctaccgtccgtctcagccaagcctggagagaccagaagcaacacaagaccctacaaacccacctatggaggggcagggagaggcccaggtcaggccaccctcacctttcagacaggaggcacttggttctctaagatgaagaagggcggctcccacccagaacattctgtgtcacggagaagaggtttcccaatagcatcttccccaacctagaaatgtctgaaacctggacaaagacagacactcaaagaggatctctgcgggcatgtggggatgtcagggccaa

SEQ ID NO: 596 - DNA, 251 bp, Artificial Sequence
  Description of Artificial sequences:primer
  misc_feature (1)..(251): 5' terminal sequence from clone image:277740. cysteine conjugate-beta lyase, cytoplasmic (glutamine transaminase k, kyneurenine aminotransferase)(CCBL1) gene.
cctgtctccatcttctatagtgtgccacatcagaagcactttgaccactatatccgcttctgttttgtgaaggatgaagccacgctccaggccatggacgagaagctgcggaagtggaaggtggaactctagccctgaagtcacgccttggcctgacatccccacatgcccgcagagatcctctttgagtgtctgtctttgtccaggtttcagacatttctaggttggggaagatgctattgggaaacctc

SEQ ID NO: 597 - DNA, 1725 bp, Artificial Sequence
  Description of Artificial sequences:primer
  misc_feature (1)..(1725): cysteine conjugate-beta lyase cytoplasmic (glutamine transaminase k, kyneurenine aminotransferase)(CCBL1) gene.
atggccaaacagctgcaggcccgaaggctagacgggatcgactacaacccctgggtggagtttgtgaaactggccagtgagcatgacgtcgtgaacttgggccagggcttcccggatttcccaccaccagactttgccgtggaagcctttcagcacgctgtcagtggagacttcatgcttaaccagtacaccaagacatttggttacccaccactgacgaagatcctggcaagtttctttggggagctgctgggtcaggagatagacccgctcaggaatgtgctggtgactgttggtggctatggggccctgttcacagccttccaggccctggtggacgaaggagacgaggtcatcatcatcgaacccttttttgactgctacgagcccatgacaatgatggcagggggtcgtcctgtgtttgtgtccctgaagccgggtcccatccagaatggagaactgggttccagcagcaactggcagctggaccccatggagctggccggcaaattcacatcacgcaccaaagccctggtcctcaacacccccaacaaccccctgggcaaggtgttctccagggaagagctggagctggtggccagcctttgccagcagcatgacgtggtgtgtatcactgatgaagtctaccagtggatggtctacgacgggcaccagcacatcagcattgccagcctccctggcatgtgggaacggaccctgaccatcggcagcgccggcaagaccttcagcgccactggctggaaggtgggctgggtcctgggtccagatcacatcatgaagcacctgcggaccgtgcaccagaactccgtcttccactgccccacgcagagccaggctgcagtagccgagagctttgaacgggagcagctgctcttccgccaacccagcagctactttgtgcagttcccgcaggccatgcagcgctgccgtgaccacatgatacgtagcctacagtcagtgggcctgaagcccatcatccctcagggcagctacttcctcatcacagacatctcagacttcaagaggaagatgcctgacttgcctggagctgtggatgagccctatgacagacgcttcgtcaagtggatgatcaagaacaagggcttggtggccatccctgtctccatcttctatagtgtgccacatcagaagcactttgaccactatatccgcttctgttttgtgaaggatgaagccacgctccaggccatggacgagaagctgcggaagtggaaggtggaactctagccctgaagtcacgccttggccctgacatccccacatgcccgcagagatcctctttgagtgtctgtctttgtccaggtttcagacatttctaggttggggaagatgctattgggaaacctcttctccgtgacacagaatgttctgggtgggagccgcccttcttcatcttagagaaccaagtgcctcctgtctgaaaggtgagggtggcctgacctgggcctctccctgcccctccataggtgggtttgtagggtcttgtgttgcttctggtctctccaggcttggctgagacggacggtagacttccaccatgtaccgatcacatcccagctctgcatggcccctgctaaggctcaggtataacctcaccttccctggctcatcttggccttggggagttgcctttaggcttgagtcctcaagcctctccttttcgtccataataaaatgtttaag

SEQ ID NO: 598 - DNA, 575 bp, Artificial Sequence
  Description of Artificial sequences:primer
  misc_feature (1)..(575): 3' terminal sequence from clone image:2783684. inhibitor of dna binding 4, dominant negative helix-loop-helix protein(ID4) gene.
tttttttacaagacagagaaatctactttaatattcacatgtaaaagttacacatcacaagagattggacagtagcttagcgtaacatagctatagtgaaaatcatttttataaaaaaataatctagatgcggtcatcagaatttttggtctgcttaagttaatgtttgaagatcgacttttatccctgcttgaaggatttgccattatgccttttttttctcccactgttgcctattaattctttggaggaaggaaagcagaaagtgttcatttccaagagtttgtcctttggtagcaagcagagaacatttttttcatttccatgatttaaataatctgtacagacatgaaacttagtgacattaagctttagtgtaaaatgaagagtaataagcaattttttttcactttgataaaacagcagatttcgtaaactccttaaggatccaagcatttcctcatcccatatgcaaaatcattcagaatccattttgacctcagttgaaaaacaaaaacaaacacttactctgtatatattacactataaaaccctgtacttaaaaactgataagg

SEQ ID NO: 599 - DNA, 512 bp, Artificial Sequence
  Description of Artificial sequences:primer
  misc_feature (1)..(512): 5' terminal sequence from clone image:2783684. inhibitor of dna binding 4, dominant negative helix-loop-helix protein(ID4) gene.
gaggcgcggttgtgagtagtaccgggagtggggtgatcccgggctaggggagcgcggcggccgcgatcgggcttagtcggagctccgaagggagtgactaggacacccgggtgggctacttttcttccggtgcttttgctttttttttcctttgggctcgggctgagtgtcgcccactgagcaaagattccctcgtaaaacccagagcgaccctcccgtcaattgttgggctcgggagtgtcgcggtgccccgagcgcgccgggcgcggaggcaaagggagcggagccggccgcggacggggcccggagcttgcctgcctccctcgctcgccccatacgggttcgctcgcgtagagcgcagggcgcgcgcgatgaaggcggggttcccggtgcgccgctcgggccgcaaggcgccgtatggctgcggaggcatggaatctgcgctgcgctgtctttgcgagcacagtcaagagattgtgtgctctaattctgaagatgaaggcgaatcagcg

SEQ ID NO: 600 - DNA, 2389 bp, Artificial Sequence
  Description of Artificial sequences:primer
  misc_feature (1)..(2389): inhibitor of dna binding 4, dominant negative helix-loop-helix protein(ID4) gene.
aggcgcggttgtgagtagtaccgggagtggggtgatcccgggctaggggagcgcggcggccgcgatcgggcttagtcggagctccgaagggagtgactaggacacccgggtgggctacttttcttccggtgcttttgctttttttttcctttgggctcgggctgagtgtcgcccactgagcaaagattccctcgtaaaacccagagcgaccctcccgtcaattgttgggctcgggagtgtcgcggtgccccgagcgcgccgggcgcggaggcaaagggagcggagccggccgcggacggggcccggagcttgcctgcctccctcgctcgccccagcgggttcgctcgcgtagagcgcagggcgcgcgcgatgaaggcggtgagcccggtgcgcccctcgggccgcaaggcgccgtcgggctgcggcggcggggagctggcgctgcgctgcctggccgagcacggccacagcctgggtggctccgcagccgcggcggcggcggcggcggcagcgcgctgtaaggcggccgaggcggcggccgacgagccggcgctgtgcctgcagtgcgatatgaacgactgctatagccgcctgcggaggctggtgcccaccatcccgcccaacaagaaagtcagcaaagtggagatcctgcagcacgttatcgactacatcctggacctgcagctggcgctggagacgcacccggccctgctgaggcagccaccaccgcccgcgccgccacaccacccggccgggacctgtccagccgcgccgccgcggaccccgctcactgcgctcaacaccgacccggccggcgcggtgaacaagcagggcgacagcattctgtgccgctgagccgcgctgtccaggtgtgcggccgcctgagcccgagccaggagcactagagagggagggggaagagcagaagttagagaaaaaaagccaccggaggaaaggaaaaaacatcggccaacctagaaacgttttcattcgtcattccaagagagagagaggaaagaaaaatacaactttcattctttctttgcacgttcataaacattctacatacgtattctcttttgtctcttcatttataactgctgtgaattgtacatttctgtgttttttggaggtgcagttaaacttttaagcttaagtgtgacaggactgataaatagaagatcaagagtagatccgactttagaagcctactttgtgaccaaggagctcaatttttgttttgaagctttactaatctaccagagcattgtagatattttttttttacatctattgtttaaaatagatgattataacggggcagagaactttcttttctctgcaagaatgttacatattgtatagataaatgagtgacatttcataccatgtatatatagagatgttctataagtgtgagaaagtatatgctttaatagatactgtaattataagatatttttaattaaatatttttttgtaaatattatgtgtgtgtttttttttaatctatgggaatatttcttttggaaaatcatttttcagctcaattacagagctcttgatatcttgaatgtcttttctgtttggcctggctcttaatttgcttttgttttgcccagtatagactcggaagtaacagttatagctagtggtcttgcatgattgcatgagatgtttaatcacaaattaaacttgttctgagtccattcaaatgtgtttttttaaatgtagattgaaatctttgtatttgaagcatacatgttgaaaatacaccttatcagtttttaagtacagggttttatagtgtaatatatacagagtaagtgtttgtttttgtttttcaactgaggtcaaaatggattctgaatgattttgcatatgggatgaggaaatgcttggatccttaaggagtttacgaaatctgctgttttatcaaagtgaaaaaaaattgcttattactcttcattttacactaaagcttaatgtcactaagtttcatgtctgtacagattatttaaatcatggaaatgaaaaaaatgttctctgcttgctaccaaaggacaaactcttggaaatgaacactttctgctttccttcctccaaagaattaataggcaacagtgggagaaaaaaaaggcataatggcaaatccttcaagcagggataaaagtcgatcttcaaacattaacttaagcagaccaaaaattctgatgaccgcatctagattatttttttataaaaatgattttcactatagctatgttacgctaagctactgtcccatctcttgtgatgtgtaacttttacatgtgaatattaaagtagatttctctgtcttgtaaaaaaaaaaaaaaaaaaaaaaaaaaaaaaaaaaaaaaaaaaaaaa

SEQ ID NO: 601 - DNA, 484 bp, Artificial Sequence
  Description of Artificial sequences:primer
  misc_feature (1)..(484): 3' terminal sequence from clone image:279460. tubulin, epsilon 1(TUBE1) gene.
  misc_feature (421)..(421): n is a, c, g, or t
  misc_feature (477)..(477): n is a, c, g, or t
tttctgtacaagatttttattgaagacacatcagtgcataaatgcctaaatatgaggctataaatacagcaaaatattcaagaactatgttatctcaattttagaaaagggaacttttctgaagagaaatgtttgaagttaaggtactaagatttcactaatttcacacattggtattaccaacaaattgcgattaaacagaaatcactcttttagacaaaaatatttcccgataatatgaaaaaactggagtttccaaattacaaaaatgttgaaacagaaaggtcagaaaaaacaatgtgaaattaagaaagtatttttgagggtttctttttcacatagctatgcttagtctgggtaaatcctgcacaggcatgttttttgtggcgtccagttgggtcatattccccgtatgagtgcngataaagatggacacagcttcctggtgaacagctttcttccatcccttccacctgnagatagt

SEQ ID NO: 602 - DNA, 257 bp, Artificial Sequence
  Description of Artificial sequences:primer
  misc_feature (1)..(257): 5' terminal sequence from clone image:279460. tubulin, epsilon 1(TUBE1) gene.
  misc_feature (24)..(25): n is a, c, g, or t
  misc_feature (233)..(233): n is a, c, g, or t
  misc_feature (239)..(239): n is a, c, g, or t
gcttgggtacaactgtgaagccanngagtctggttacttcaagttctggggctttaaaaaagcagcataagaagccctttgatgcaatgaataacattgtggcaaatttgctcctcaacctaacgagctctgcaagatttgaagggtcccttaatatggaccttaatgaaatcagcatgaatttagttccttttcctcaacttcattatctcgtgtcaagcctaacaccacanctcttnaataccctgacagatcta

SEQ ID NO: 603 - DNA, 2101 bp, Artificial Sequence
  Description of Artificial sequences:primer
  misc_feature (1)..(2101): tubulin, epsilon 1(TUBE1) gene.
agcgggagccggcggcgcaccaccatgacccagtcggtggtcgtacaggtcggccagtgcggaaaccagatcggctgctgcttctgggacctggcactaagggagcacgccgcggtcaaccagaaaggaatttatgatgaggcaataagcagcttctttagaaatgtggacaccagagtggttggtgatggtggaagtatttccaagggaaaaatatgttctttaaaagcacgagcagtcttgattgatatggaagaaggggtagtgaatgaaattctgcagggaccactgagagatgtatttgatacgaaacagctcatcactgatatttctggctcaggaaataattgggccgtgggtcacaaagttttcggcagtctttaccaagaccagattttagagaaattcagaaagtcggcagagcactgtgattgcttgcagtgtttctttataatacattccatgggaggaggaacaggatctggacttggcacatttcttttaaaggtgcttgaagacgaattcccagaagtatacagatttgtgacttccatttatccttctggtgaggatgatgtcataacctcaccttataatagcatcttggcaatgaaggaacttaatgagcatgcagactgtgtattgcccattgacaatcaatctttatttgacatcattagcaaaatcgacctcatggtgaattctggaaagttgggtacaactgtgaagccaaagagtctggttacttcaagttctggggctttaaaaaagcagcataagaagccctttgatgcaatgaataacattgtggcaaatttgctcctcaacctaacgagctctgcaagatttgaagggtcccttaatatggaccttaatgaaatcagcatgaatttagttccttttcctcaacttcattatctcgtgtcaagcctaacacctctgtatacactgacagatgttaacattcctcctagaagattggatcagatgttttcagatgcctttagtaaagatcaccagctgcttcgggcagaccccaaacacagtctttacctcgcctgtgcactcatggttagaggaaatgtacaaatttcagatcttcgtagaaatattgaaagattaaaaccatctctacaatttgtctcctggaatcaagaaggctggaagaccagcctgtgttccgtacctcctgtgggccattctcattcgttattagctttagcaaataacacatgtgtgaagcccaccttcatggaactgaaagagagattcatgaggctctacaagaaaaaggctcaccttcatcactatctacaagttgaagggatggaagaaagctgtttcacagaagctgtgtcatctttatcagcactcatacaggaatatgaccaactggacgccacaaaaaacatgcctgtgcaggatttacccagactaagcatagctatgtgaaaaagaaaccctcaaaaatactttcttaatttcacattgttttttctgacctttctgtttcaacatttttgtaatttggaaactccagttttttcatattatcgggaaatatttttgtctaaaagagtgatttctgtttaatcgcaatttgttggtaataccaatgtgtgaaattagtgaaatcttagtaccttaacttcaaacatttctcttcagaaaagttcccttttctaaaattgagataacatagttcttgaatattttgctgtatttatagcctcatatttaggcatttatgcactgatgtgtcttcaataaaaatcttgtacagatatatttttataattatttataatttatattttgatattctatttaagttatcctgattctttaaaagtagttattgggagtagaagaacacaatataaatatttccgtgtaatagccaccaacttttcaggcataggttttattacaactgttaaggaggttttgcttcttctttagataacaacttgtttgcccaaaagaatcctaatttgtacacttaacatgtatttgtattaaactttttaaataattgctttcttatcaaaccaattgattttataataaatgtctatatttttcaaaaaaaaaaaaaaaa

SEQ ID NO: 604 - DNA, 285 bp, Artificial Sequence
  Description of Artificial sequences:primer
  misc_feature (1)..(285): 3' terminal sequence from clone image:28019. multiple pdz domain protein(MPDZ) gene.
  misc_feature (269)..(269): n is a, c, g, or t
ttttttttagtttggggtggggagaggaggtagattgccaaattgaggcattttttttaaactccccgagattttcttctttattttatattttcatttttcatcctaatttactgaagccattttctttggttaactttagaattatctttctttatactaaccagcttagcatgtaataattcttgcccatgtgactacaaaacattaggatatctccacaaataaaaacgaggattcacctacacaaatattccttctctttaagntcacaaaatgcaagga

SEQ ID NO: 605 - DNA, 503 bp, Artificial Sequence
  Description of Artificial sequences:primer
  misc_feature (1)..(503): 5' terminal sequence from clone image:28019. multiple pdz domain protein(MPDZ) gene.
  misc_feature (287)..(287): n is a, c, g, or t
  misc_feature (334)..(334): n is a, c, g, or t
  misc_feature (358)..(358): n is a, c, g, or t
  misc_feature (363)..(363): n is a, c, g, or t
  misc_feature (384)..(384): n is a, c, g, or t
  misc_feature (408)..(408): n is a, c, g, or t
  misc_feature (414)..(414): n is a, c, g, or t
  misc_feature (432)..(432): n is a, c, g, or t
  misc_feature (444)..(444): n is a, c, g, or t
  misc_feature (461)..(461): n is a, c, g, or t
  misc_feature (471)..(471): n is a, c, g, or t
  misc_feature (493)..(493): n is a, c, g, or t
caatgtcctgagacagacgccacagagagtgcgcctgacactctacagagatgaggccccatacaaagaggaggaagtgtgtgacaccctcactattgagctgcagaagaagccgggaaaaggcctaggattaagtattgttggtaaaagaaacgatactggagtatttgtgtcagacattgtcaaaggaggaattgcagatgccgatggaagactgatgcagggagaccagatattaatggtgaatggggaagacgttcgtaatgccacccaagaagcggttgccnttttgctaaaagtgtttccctagggcacagttaaccttgggaagttnggaaggattcaaagctgggtcccnttccntttcaggaggagggagggccntttttcaaaggcagcccagggttnagtttnaaggggcagcctctttcntcttttttcacntttttcccacttttttngggatccccntttacattttgagttccacttngggaagttag

SEQ ID NO: 606 - DNA, 6582 bp, Artificial Sequence
  Description of Artificial sequences:primer
  misc_feature (1)..(6582): multiple pdz domain protein(MPDZ) gene.
tgctgctgttaatcatttcagagaagaacactgaactttgaaaaaaatgttggaagccattgacaaaaatcgggccctgcatgcagcagagcgcttgcaaaccaagctgcgagaacgtggggatgtagcaaatgaagacaaactgagccttctgaagtcagtcctgcagagccctctcttcagtcagattctgagccttcagacttctgtacagcagctgaaagaccaggtaaatattgcaacttcagcaacttcaaatattgaatatgcccacgttcctcatctcagcccagctgtgattcctactctgcaaaatgaatcgtttttattatccccaaacaatgggaatctggaagcacttacaggacctggtattccacacattaatgggaaacctgcttgtgatgaatttgatcagcttatcaaaaatatggcccagggtcgccatgtagaagtttttgagctcctcaaacctccatctggaggccttgggtttagtgttgtgggactaagaagtgaaaacagaggagagctgggaatatttgttcaagagatacaagagggcagtgtggcccatagagatggaagattgaaagaaactgatcaaattcttgctatcaatggacaggctcttgatcagacaattacacatcagcaggctatcagcatcctgcagaaagccaaagatactgtccagctagttattgccagaggctcattgcctcagcttgtcagccccatagtttcccgttctccatctgcagccagcacaatttcagctcactctaatccggttcactggcaacacatggaaacgattgaattggtgaatgatggatctggtttgggatttggcatcataggaggaaaagcaactggtgtgatagtaaaaaccattctgcctggaggagtagctgatcagcatgggcgtttatgcagtggagaccacattctaaagattggtgacacagatctagcaggaatgagcagtgagcaagtagcacaagtccttaggcaatgtggaaatagagttaagttgatgattgcaagaggtgccatagaagaacgtacagcacccactgctttgggcatcaccctctcctcatccccaacttcaacaccagagttgcgggttgatgcttctactcagaaaggtgaagaaagtgagacatttgatgtagaactcactaaaaatgtccaaggattaggaattaccattgctggctacattggagataaaaaattggaaccttcaggaatctttgtaaagagcattacaaaaagcagtgccgttgagcatgatggaagaatccaaattggagaccaaattatagcagtagatggcacaaaccttcagggttttactaatcagcaagcagtagaggtattgcgacatacaggacaaactgtgctcctgacactaatgaggagaggaatgaagcaggaagccgagctcatgtcaagggaagacgtcacaaaagatgcagatttgtctcctgttaatgccagcataatcaaagaaaattatgaaaaagatgaagattttttatcttcgacgagaaacaccaacatattaccaactgaagaagaagggtatccattactgtcagctgagatagaagaaatagaagatgcacaaaaacaagaagctgctctgctgacaaaatggcaaaggattatgggaattaactatgaaatagtggtggcccatgtgagcaagtttagtgagaacagtggattggggataagcctggaagcgacagtgggacatcattttatccgatctgttctaccagagggtcctgttggacacagcgggaagctcttcagtggagacgagctattggaagtaaatggcataactttacttggggaaaatcaccaagatgtggtgaatatcttaaaagaactgcctatagaagtgacaatggtgtgctgtcgtcgaactgtgccacccaccacccaatcagaattggatagcctggacttatgtgatattgagctaacagaaaagcctcacgtagatctaggtgagttcatcgggtcatcagagacagaggatccagtgctggcgatgactgatgcgggtcagagtacagaagaggttcaagcacctttggccatgtgggaggctggcattcagcacatagagctggagaaagggagcaaaggacttggttttagcattttagattatcaggatccaattgatccagcaagcactgtgattataattcgttctttggtgcctggcggcattgctgaaaaggatggacgacttcttcctggtgaccgactcatgtttgtaaacgatgttaacttggaaaacagcagtcttgaggaagctgtagaagcactgaagggagcaccgtcagggactgtgagaataggagttgctaagcctttacccctttcaccagaagaaggttatgtttctgctaaggaggattcctttctctacccaccacactcctgtgaggaagcagggctggctgacaaacccctcttcagggctgacttggctctggtgggcacaaatgatgctgacttagtagatgaatccacatttgagtctccatactctcctgaaaatgacagcatctactctactcaagcctctattttatctcttcatggcagttcttgtggtgatggcctgaactatggttcttcccttccatcatctcctcctaaggatgttattgaaaattcttgtgatccagtacttgatctgcatatgtctctggaggaactatatacccagaatctcctgcaaagacaggatgagaatacaccttcggtggacataagtatggggcctgcttctggctttactataaatgactacacacctgcaaatgctattgaacaacaatatgaatgtgaaaacacaatagtgtggactgaatctcatttaccaagtgaagttatatcaagtgcagaacttccttctgtgctacccgattcagctggaaagggctctgagtacctgcttgaacagagctccctggcctgtaatgctgagtgtgtcatgcttcaaaatgtatctaaagaatcttttgaaaggactattaatatagcaaaaggcaattctagcctaggaatgacagttagtgctaataaagatggcttggggatgatcgttcgaagcattattcatggaggtgccattagtcgagatggccggattgccattggggactgcatcttgtccattaatgaagagtctaccatcagtgtaaccaatgcccaggcacgagctatgttgagaagacattctctcattggccctgacataaaaattacttatgtgcctgcagaacatttggaagagttcaaaataagcttgggacaacaatctggaagagtaatggcactggatattttttcttcatacactggcagagacattccagaattaccagagcgagaagagggagagggtgaagaaagcgaacttcaaaacacagcatatagcaattggaatcagcccaggcgggtggaactctggagagaaccaagcaaatccttaggcatcagcattgttggtggacgagggatggggagtcggctaagcaatggagaagtgatgaggggcattttcatcaaacatgttctggaagatagtccagctggcaaaaatggaaccttgaaacctggagatagaatcgtagaggtggatggaatggacctcagagatgcaagccatgaacaagctgtggaagccattcggaaagcaggcaaccctgtagtctttatggtacagagcattataaacagaccaaggaaatcccctttgccttccttgctgcacaacctttaccctaagtacaacttcagcagcactaacccatttgctgactctctacaaatcaacgccgacaaggcacccagtcagtcagagtcagagccagagaaggctccattgtgcagtgtgcccccaccccctccttcagcctttgccgaaatgggtagtgatcacacacagtcatctgcaagcaaaatctcacaagatgtggacaaagaggatgagtttggttacagctggaaaaatatcagagagcgttatggaaccctaacaggcgagctgcatatgattgaactggagaaaggtcatagtggtttgggcctaagtcttgctgggaacaaagaccgatccaggatgagtgtcttcatagtggggattgatccaaatggagctgcaggaaaagatggtcgattgcaaattgcagatgagcttctagagatcaatggtcagattttatatggaagaagtcatcagaatgcctcatcaatcattaaatgtgccccttctaaagtgaaaataatttttatcagaaataaagatgcagtgaatcagatggccgtatgtcctggaaatgcagtagaacctttgccttctaactcagaaaatcttcaaaataaggagacagagccaactgttactacttctgatgcagctgtggacctcagttcatttaaaaatgtgcaacatctggagcttcccaaggatcaggggggtttgggtattgctatcagcgaagaagatacactcagtggagtcatcataaagagcttaacagagcatggggtagcagccacggatggacgactcaaagtcggagatcagatactggctgtagatgatgaaattgttgttggttaccctattgaaaagtttattagccttctgaagacagcaaagatgacagtaaaacttaccatccatgctgagaatccagattcccaggctgttccttcagcagctggtgcagccagtggagaaaaaaagaacagctcccagtctctgatggtcccacagtctggctccccagaaccggagtccatccgaaatacaagcagatcatcaacaccagcaatttttgcttctgatcctgcaacctgccccattatccctggctgcgaaacaaccatcgagatttccaaagggcgaacagggctgggcctgagcatcgttgggggttcagacacgctgctgggtgccattattatccatgaagtttatgaagaaggagcagcatgtaaagatggaagactctgggctggagatcagatcttagaggtgaatggaattgacttgagaaaggccacacatgatgaagcaatcaatgtcctgagacagacgccacagagagtgcgcctgacactctacagagatgaggccccatacaaagaggaggaagtgtgtgacaccctcactattgagctgcagaagaagccgggaaaaggcctaggattaagtattgttggtaaaagaaacgatactggagtatttgtgtcagacattgtcaaaggaggaattgcagatgccgatggaagactgatgcagggagaccagatattaatggtgaatggggaagacgttcgtaatgccacccaagaagcggttgccgctttgctaaagtgttccctaggcacagtaaccttggaagttggaagaatcaaagctggatccagtacatctgagtcactggaaagtagctcaaagaagaatgcattggcatctgaaatacagggattaagaacagtcgaaatgaaaaagggccctactgactcactgggaatcagcatcgctggaggagtaggcagcccacttggtgatgtgcctatatttattgcaatgatgcacccaactggagttgcagcacagacccaaaaactcagagttggggataggattgtcaccatctgtggcacatccactgagggcatgactcacacccaagcagttaacctactgaaaaatgcatctggctccattgaaatgcaggtggttgctggaggagacgtgagtgtggtcacaggtcatcagcaggagcctgcaagttccagtctttctttcactgggctgacgtcaagcagtatatttcaggatgatttaggacctcctcaatgtaagtctattacactagagcgaggaccagatggcttaggcttcagtatagttggaggatatggcagccctcatggagacttacccatttatgttaaaacagtgtttgcaaagggagcagcctctgaagacggacgtctgaaaaggggcgatcagatcattgctgtcaatgggcagagtctagaaggagtcacccatgaagaagctgttgccatccttaaacggacaaaaggcactgtcactttgatggttctctcttgaattggctgccagaattgaaccaacccaacccctagctcacctcctactgtaaagagaatgcactggtcctgacaatttttatgctgtgttcagccgggtcttcaaaactgtaggggggaaataacacttaagtttctttttctcatctagaaatgctttccttactgacaacctaacatcatttttcttttcttcttgcattttgtgaacttaaagagaaggaatatttgtgtaggtgaatctcgtttttatttgtggagatatctaatgttttgtagtcacatgggcaagaattattacatgctaagctggttagtataaagaaagataattctaaagctaaccaaagaaaatggcttcagtaagttaggatgaaaaatgaaaatataaaaaaaaaaaaaaaaaaa

SEQ ID NO: 607 - DNA, 450 bp, Artificial Sequence
  Description of Artificial sequences:primer
  misc_feature (1)..(450): 3' terminal sequence from clone image:283375. calcium channel, voltage-dependent, alpha 1i subunit(CACNA1I) gene.
  misc_feature (440)..(440): n is a, c, g, or t
  misc_feature (450)..(450): n is a, c, g, or t
tttttttcttaaataggcttctgggcttttattcaaaacaacactggtggtggctgccgcttggtttctctacacccgggccatgggcagcaaggtaccagcgccatcagcaactaggagggaagttcattcacaccatagaaactgtacagcgactgagagtgctagagtcacggcggcggccaggccaagggctttctggaggaggtggcctctgcctcctcagtaggctgcagcttggcccaggctctgcaaggaacactgattattgcacaaagacaaaaaagagtatgtgtatctgggctaaagagcagcttctaagaccccaagcccttacacaacgcagcaaacggggctggggttggccctggaagcggaaggctctgagctgaggatttgggggaagacagcagacggggctttacacactttgtcctccnttaaggggcn

SEQ ID NO: 608 - DNA, 406 bp, Artificial Sequence
  Description of Artificial sequences:primer
  misc_feature (1)..(406): 5' terminal sequence from clone image:283375. calcium channel, voltage-dependent, alpha 1i subunit(CACNA1I) gene.
caggtgttctaggcaaagggatgggcatgagcgaaggctccagggtccacagagcagggagtgtggagaaggtggaagagctgagctcagaggcagagaagctccttgcagggagcactgggagatggcctggcccgtcccaggctcctggaggccccacctgccgatcccaggcacttgaccttgttcctgtgggtgacagagatgagaaccagggaagctgtgatccactggccaggacaagtcaacatgggtgagggttgggcaaagggcccttccttcctccccaaccctgtggtctggggccatggcctcaggctttgtgtctatcacaaaagcacaaacttgccctaacccacatgggcctggctgtggggaaagtggggacccaggtccctgaagctgt

SEQ ID NO: 609 - DNA, 6990 bp, Artificial Sequence
  Description of Artificial sequences:primer
  misc_feature (1)..(6990): calcium channel, voltage-dependent, alpha 1i subunit(CACNA1I) gene.
atggctgagagcgcctccccgccctcctcatctgcagcagccccagccgctgagccaggagtcaccacggagcagcccggaccccggagccccccatcctccccgccaggcctggaggagcctctggatggagctgatcctcatgtcccacacccagacctggcgcctattgccttcttctgcctgcgacagaccaccagcccccggaactggtgcatcaagatggtgtgcaacccgtggtttgaatgtgtcagcatgctggtgatcctgctgaactgcgtgacacttggcatgtaccagccgtgcgacgacatggactgcctgtccgaccgctgcaagatcctgcaggtctttgatgacttcatctttatcttctttgccatggagatggtgctcaagatggtggccctggggatttttggcaagaagtgctacctcggggacacatggaaccgcctggatttcttcatcgtcatggcagggatggtcgagtactccctggaccttcagaacatcaacctgtcagccatccgcaccgtgcgcgtcctgaggcccctcaaagccatcaaccgcgtgcccagtatgcggatcctggtgaacctgctcctggacacactgcccatgctggggaatgtcctgctgctctgcttctttgtcttcttcatctttggcatcataggtgtgcagctctgggcgggcctgctgcgtaaccgctgcttcctggaggagaacttcaccatacaaggggatgtggccttgcccccatactaccagccggaggaggatgatgagatgcccttcatctgctccctgtcgggcgacaatgggataatgggctgccatgagatccccccgctcaaggagcagggccgtgagtgctgcctgtccaaggacgacgtctacgactttggggcggggcgccaggacctcaatgccagcggcctctgtgtcaactggaaccgttactacaatgtgtgccgcacgggcagcgccaacccccacaagggtgccatcaactttgacaacatcggttatgcttggattgtcatcttccaggtgatcactctggaaggctgggtggagatcatgtactacgtgatggatgctcactccttctacaacttcatctacttcatcctgcttatcatagtgggctccttcttcatgatcaacctgtgcctcgttgtcatagcgacccagttctcggagaccaagcaacgggagcaccggctgatgctggagcagcggcagcgctacctgtcctccagcacggtggccagctacgccgagcctggcgactgctacgaggagatcttccagtatgtctgccacatcctgcgcaaggccaagcgccgcgccctgggcctctaccaggccctgcagagccggcgccaggccctgggcccggaggccccggcccccgccaaacctgggccccacgccaaggagccccggcactaccatgggaagactaagggtcagggagatgaagggagacatctcggaagccggcattgccagactttgcatgggcctgcctcccctggaaatgatcactcgggaagagagctgtgcccgcaacatagccccctggatgcgacgccccacaccctggtgcagcccatccccgccacgctggcttccgatcccgccagctgcccttgctgccagcatgaggacggccggcggccctcgggcctgggcagcaccgactcgggccaggagggctcgggctccgggagctccgctggtggcgaggacgaggcggatggggacggggcccggagcagcgaggacggagcctcctcagaactggggaaggaggaggaggaggaggagcaggcggatggggcggtctggctgtgcggggatgtgtggcgggagacgcgagccaagctgcgcggcatcgtggacagcaagtacttcaaccggggcatcatgatggccatcctggtcaacaccgtcagcatgggcatcgagcaccacgagcagccggaggagctgaccaacatcctggagatctgcaatgtggtcttcaccagcatgtttgccctggagatgatcctgaagctggctgcatttgggctcttcgactacctgcgtaacccctacaacatcttcgacagcatcattgtcatcatcagcatctgggagatcgtggggcaggcggacggtgggctgtcggtgctgcggaccttccggctgctgcgcgtgctgaaactggtgcgcttcatgcctgccctgcggcgccagctcgtggtgctcatgaagaccatggacaacgtggccaccttctgcatgctgctcatgctcttcatcttcatcttcagcatccttgggatgcatatttttggctgcaagttcagcctccgcacggacactggagacacggtgcccgacaggaagaacttcgactccctgctgtgggccatcgtcactgtgttccagatcctcacccaggaggactggaacgtcgttctctacaatggcatggcctccacttctccctgggcctccctctactttgtcgccctcatgaccttcggcaactatgtgctcttcaacctgctggtggccatcctggtggagggcttccaggcggagggtgacgccaatcgctcctactcggacgaggaccagagctcatccaacatagaagagtttgataagctccaggaaggcctggacagcagcggagatcccaagctctgcccaatccccatgacccccaatgggcacctggaccccagtctcccactgggtgggcacctaggtcctgctggggctgcgggacctgccccccgactctcactgcagccggaccccatgctggtggccctgggctcccgaaagagcagtgtcatgtctctagggaggatgagctatgaccagcgctccctgtccagctcccggagctcctactacgggccatggggccgcagcgcggcctgggccagccgtcgctccagctggaacagcctcaagcacaagccgccgtcggcggagcatgagtccctgctctctgcggagcgcggcggcggcgcccgggtctgcgaggttgccgcggacgaggggccgccgcgggccgcacccctgcacaccccacacgcccaccacattcatcacgggccccatctggcgcaccgccaccgccaccaccgccggacgctgtccctcgacaacagggactcggtggacctggccgagctggtgcccgcggtgggcgcccacccccgggccgcctggagggcggcaggcccggcccccgggcatgaggactgcaatggcaggatgcccagcatcgccaaagacgtcttcaccaagatgggcgaccgcggggatcgcggggaggatgaggaggaaatcgactacaccctgtgcttccgcgtccgcaagatgatcgacgtctataagcccgactggtgcgaggtccgcgaagactggtctgtctacctcttctctcccgagaacaggttccgggtcctgtgtcagaccattattgcccacaaactcttcgactacgtcgtcctggccttcatctttctcaactgcatcaccatcgccctggagcggcctcagatcgaggccggcagcaccgaacgcatctttctcaccgtgtccaactacatcttcacggccatcttcgtgggcgagatgacattgaaggtagtctcgctgggcctgtacttcggcgagcaggcgtacctacgcagcagctggaacgtgctggatggctttcttgtcttcgtgtccatcatcgacatcgtggtgtccctggcctcagccgggggagccaagatcttgggggtcctccgagtcttgcggctcctgcgcaccctacgccccctgcgtgtcatcagccgggcgccgggcctgaagctggtggtggagacactcatctcctccctcaagcccatcggcaacatcgtgctcatctgctgtgccttcttcatcatctttggcatcctgggagtgcagctcttcaagggcaagttctaccactgtctgggcgtggacacccgcaacatcaccaaccgctcggactgcatggccgccaactaccgctgggtccatcacaaatacaacttcgacaacctgggccaggctctgatgtccctctttgtcctggcatccaaggatggttgggtgaacatcatgtacaatggactggatgctgttgctgtggaccagcagcctgtgaccaaccacaacccctggatgctgctgtacttcatctccttcctgctcatcgtcagcttctttgtgctcaacatgtttgtgggtgtcgtggtggagaacttccacaagtgccggcagcaccaggaggctgaagaggcacggcggcgtgaggagaagcggctgcggcgcctggagaagaagcgccggaaggcccagcggctgccctactatgccacctattgtcacacccggctgctcatccactccatgtgcaccagccactacctggacatcttcatcaccttcatcatctgcctcaacgtggtcaccatgtccctggagcactacaatcagcccacgtccctggagacagccctcaagtactgcaactatatgttcaccactgtctttgtgctggaggctgtgctgaagctggtggcatttggtctgaggcgcttcttcaaggaccgatggaaccagctggacctggccattgtgctactgtcagtcatgggcatcaccctggaggagatcgagatcaatgcggccctgcccatcaatcccaccatcatccgcatcatgagggttctgcgcattgcccgagtgctgaagctgttgaagatggccacaggaatgcgggccctgctggacacggtggtgcaagctttgccccaggtgggcaacctgggcctcctcttcatgctgctcttcttcatctatgctgctctcggggtggagctctttgggaagctggtctgcaacgacgagaacccgtgcgagggcatgagccggcatgccaccttcgagaacttcggcatggccttcctcacactcttccaggtctccacgggtgacaactggaacgggatcatgaaggacacgctgcgggactgcacccacgacgagcgcagctgcctgagcagcctgcagtttgtgtcgccgctgtacttcgtgagcttcgtgctcaccgcgcagttcgtgctcatcaacgtggtggtggctgtgctcatgaagcacctggacgacagcaacaaggaggcgcaggaggacgccgagatggatgccgagctcgagctggagatggcccatggcctgggccctggcccgaggctgcctaccggctccccgggcgcccctggccgagggccgggaggggcgggcggcgggggcgacaccgagggcggcttgtgccggcgctgctactcgcctgcccaggagaacctgtggctggacagcgtctctttaatcatcaaggactccttggagggggagctgaccatcatcgacaacctgtcgggctccatcttccaccactactcctcgcctgccggctgcaagaagtgtcaccacgacaagcaagaggtgcagctggctgagacggaggccttctccctgaactcagacaggtcctcgtccatcctgctgggtgacgacctgagtctcgaggaccccacagcctgcccacctggccgcaaagacagcaagggtgagctggacccacctgagcccatgcgtgtgggagacctgggcgaatgcttcttccccttgtcctctacggccgtctcgccggatccagagaacttcctgtgtgagatggaggagatcccattcaaccctgtccggtcctggctgaaacatgacagcagtcaagcacccccaagtcccttctccccggatgcctccagccctctcctgcccatgccagccgagttcttccaccctgcagtgtctgccagccagaaaggcccagaaaagggcactggcactggaaccctccccaagattgcgctgcagggctcctgggcatctctgcggtcaccaagggtcaactgtaccctcctccggcaggccaccgggagcgacacgtcgctggacgccagccccagcagctccgcgggcagcctgcagaccacgctcgaggacagcctgaccctgagcgacagcccccggcgtgccctggggccgcccgcgcctgctccaggaccccgggccggcctgtcccccgccgctcgccgccgcctgagcctgcgcggccggggcctcttcagcctgcgggggctgcgggcgcatcagcgcagccacagcagcgggggctccaccagcccgggctgcacccaccacgactccatggacccctcggacgaggagggccgcggtggcgcgggcggcgggggcgcgggcagcgagcactcggagaccctcagcagcctctcgctcacctccctcttctgcccgccgcccccgccgccagcccccggcctcacgcccgccaggaagttcagcagcaccagcagcctggccgcccccggccgcccccacgccgccgccctggcccacggcctggcccggagcccctcgtgggccgcggaccgcagcaaggacccccccggccgggcaccgctgcccatgggcctgggccccttggcgcccccgccgcaaccgctccccggagagctggagccgggagacgccgccagcaagaggaagagatgagggtcgcaggggcccccggccgcccaccgcccgccccgtctcaccttctttacctcaggagccaggagcagacagcaatacttcgtccacacctgggatcgcgcagggcccgcagggcacaggcgcccgacagccgggctgagcggagtctgggttagccaggcctgcgtggcccatggtggcccttccagtgcatatacatacatatatatatatatatgcatatatatatatatatatatatatatgtgtatacacacacacatagacagacatatatatatatatttattttttttactgagagcttatgacttc

SEQ ID NO: 610 - DNA, 467 bp, Artificial Sequence
  Description of Artificial sequences:primer
  misc_feature (1)..(467): 3' terminal sequence from clone image:283601. growth factor, augmenter of liver regeneration (erv1 homolog, s. cerevisiae)(GFER) gene.
  misc_feature (119)..(119): n is a, c, g, or t
  misc_feature (351)..(351): n is a, c, g, or t
  misc_feature (463)..(463): n is a, c, g, or t
cccagttcatacatttattttctaagttttacccctgtgaggagtgtgctgaagacctaagaaaaaggtaagatgtgtttgcacgcagcagagctttgcactggagcctgggcctgggnctcctggctgacgttatagcggggaacgtagagaaacggatgcagaggtggcagaagtttgctgaggagcagggacctccaacaggtgaggactggggctatctgagcctcctcctctcgtctcagaagccaagctgtcgggatctgctgctgggtactgctcctgccacagccacagggcttccaggaagggattccctgccttgtctggcacttgaaggcggtttccccnaaagttagggaagactccacttttgcctggactttctaagagtaaggactttctggttttaaaatcttgggaaaatcaactggcttttttgctcccaagaagccatctcttncctt

SEQ ID NO: 611 - DNA, 471 bp, Artificial Sequence
  Description of Artificial sequences:primer
  misc_feature (1)..(471): 5' terminal sequence from clone image:283601. growth factor, augmenter of liver regeneration (erv1 homolog, s. cerevisiae)(GFER) gene.
  misc_feature (18)..(18): n is a, c, g, or t
  misc_feature (50)..(50): n is a, c, g, or t
  misc_feature (162)..(162): n is a, c, g, or t
  misc_feature (452)..(452): n is a, c, g, or t
gcgcaaacacccacctgnacagcttggcaaactccaacgagatctcaagnaacacattacagcacagacctggcaattttataagctcctaacacccaggaagcggcatccagtgtccctggcctcaggagagtgtggcctgggtggggctgggcacagctntgtaactgaaaactggacttgtttcttagcatctgagggcaggccctggtgcgtcagttcagcaagagacttcattctaactgaccaggcttatagcaacaatggcggctctaccctatacatctggcctagaaacacctgcaagggccagtgctggctcttggatccctcagtgaggaagagatggctcttgggagcaaaagcagttgatttccaagattttaaaaccaggaagtcctactctagaagtcagggccaagtggaagtcttccctaacttgcgggaaaccnctttcagtgccagacaagt

SEQ ID NO: 612 - DNA, 2248 bp, Artificial Sequence
  Description of Artificial sequences:primer
  misc_feature (1)..(2248): growth factor, augmenter of liver regeneration (erv1 homolog, s. cerevisiae)(GFER) gene.
aagcgcgaccgacgcggggccggggcgcggggcggagagacgcggccgcctcggcctcgacgccagcccaggcgccgacctccgattctcctgtcgccgaggacgcctcccggaggcggcgtgccgggcctgcgtcgacttcaagacgtggatgcggacgcagcagaagcgggacaccaagtttagggaggactgcccgccggatcgcgaggaactgggccgccacagctgggctgtcctccacaccctggccgcctactaccccgacctgcccaccccagaacagcagcaagacatggcccagttcatacatttattttctaagttttacccctgtgaggagtgtgctgaagacctaagaaaaaggctgtgcaggaaccacccagacacccgcacccgggcatgcttcacacagtggctgtgccacctgcacaatgaagtgaaccgcaagctgggcaagcctgacttcgactgctcaaaagtggatgagcgctggcgcgacggctggaaggatggctcctgtgactagagggtggtcagccagagctcatgggacagctagccaggcatggttggataggggcagggcactcattaaagtgcatcacagccagagcctgttgtgtctcagttgggtggtccccaggacactgcctgtggggacctgccctgcccctcttaggtttggagcagaagtggaggtgcccacagcaggtacccactggccccctcctcagtggagaccccaaggagctgcagctgaactgcaggggagggaaggaggagcagcctgggctgccccttgacattcaggatgtagcttcctgcccaccgcataccctggcgcctcactcctcacacgggaagacagcgggcctggctgggcatccctgtgcctgtccctggcggccaggccattgccttcccactatgcagccagggatgcccctgccccccatggctctgtgctgctcactttagggggctcaattctccactctgctcagtcctacagggaaagctcaggtcgggtctttctgagggtccaccagccatcctaccctctccctgcctggcacatgcctgccagcgttgtgtcatgcctgtccacaggggattcgtggggctcacttcatcagagtttgaagcccaaatgaaacgctgaagtgactgagaacctggcttcagtatattttctgctggggcttaataaagcagtagacagggcttgttccatccctctgtgctcagctgcatttcctgctggggtcctggttcctcaggagagagagaccacagggtgagagtgagccaggaacagcaaggacgttgattggttggggcaggggggccagagtagctgatgtaggagtactgggaggccagacggcacgaggtctccaaggccccagcaaagccatggcttctacccctagttcccctgacaggaagttcttggcgggtttggagccaggggatggcatggagtgatgtggctttgaagggtcctctggctgctgagctgggatgaggcaggtaagggtggaacaggaggggtggggaggaagccggggcagtcaccgagtgaccaccaagaggaagacccaccccacggcggggacagatgcggggtacgttaaagggagagccagagaactcatggggtgaggatggagtccgaggagactgctgggagccgccgtgtgggtcagagatggagaaggctgagtgcagcaaggtggggggtgactgggacccagcctttgggcctccccagccagagcagcccagcaacagtgtgtcctgtggtcataaaactccagggacctctatcctccaggagtctcagcctttccctgggcgcaggcccaccttggcatggccgcctcaggcctccatggagggagctgctatgtccccaccagattggccccgtgcggctgctggcttctgtagaggctgcccagaggggccaggtggcacaaataagagaggggagatggggggcagccaggagaggaggtgtcccttcctcgcccagacacagcgcgcttctctctggcctttcccgaggcctgtgagtgcctcaggaagcagctgggccctctgggaaggctgtgttcagcttaggaacataccgcctgtatctgctgtccctcccctgcccccctgccccccccaccgccttccctttttccctgtcttccttaaagtttcactcctgaataaaacttcactttgccttaaa

SEQ ID NO: 613 - DNA, 508 bp, Artificial Sequence
  Description of Artificial sequences:primer
  misc_feature (1)..(508): 3' terminal sequence from clone image:284256. small nuclear ribonucleoprotein polypeptide b''(SNRPB2) gene.
gtgatctaattttacttaacttttattgaatggttcaatgatgttgtataattagctcctccaaagtaacactagaaaagcatcctattacacaagtttataaaccttaagtgtgttctagactagaagtcatttgatgatagggcgatgggtcaatcaagaaagcattatatacacagaatacaaataaaagtttattgtacaaaattaaggccttcgtatttcatagttcaccaaggctaaagaaacactggataatttaagtccttcacaaaaatttcacttttactcctcctcatctctaactattaaaatgacccagccaaatgttatcaaaacaaacactgtaaataacaccaagtcttttaaagacgactatcccaaatgttatttcttgggcataggtgatcttcatagcatggggacggtgtgatcttaaatccctgtaaagcatccctgggcagctccagcctggccatcattttcaattccacaaaagccatggcat

SEQ ID NO: 614 - DNA, 1110 bp, Artificial Sequence
  Description of Artificial sequences:primer
  misc_feature (1)..(1110): small nuclear ribonucleoprotein polypeptide b''(SNRPB2) gene.
gcctggctccgtttcctgcttttggttcttacagtagtcggcgtaggccttaggtgggttcgtgcgccttctacctcgctgtttcggttttcctggctcctcggcccttttctcccctgttgcagctgggagcggacgaagcgcgaagctgggattttttactgtctcctgaagaatttaacacaaacatggatatcagaccaaatcatacaatttatatcaacaatatgaatgacaaaattaaaaaggaagaattgaagagatccctatatgccctgttttctcagtttggtcatgtggtggacattgtggctttaaagaccatgaagatgagggggcaggcctttgtcatatttaaggaactgggctcatccacaaatgccttgagacagctacaaggatttccattttatggtaaaccaatgcgaatacagtatgcaaaaacagattcggatataatatcaaaaatgcgtggaacttttgctgacaaagaaaagaaaaaagaaaagaaaaaagccaaaactgtggaacagactgcaacaaccacaaacaaaaagcctggccagggaactccaaattcagctaatacccaaggaaattcaacaccaaatcctcaggtccctgattaccctccaaactatattttattccttaataacttaccagaagagactaatgagatgatgttatccatgctgtttaatcagttccctggcttcaaggaagtacgtctggtaccagggaggcatgacattgcttttgttgaatttgaaaatgatgggcaggctggagctgccagggatgctttacagggatttaagatcacaccgtcccatgctatgaagatcacctatgccaagaaataacatttgggatagtcgtctttaaaagacttggtgttatttacagtgtttgttttgataacatttggctgggtcattttaatagttagagatgaggaggagtaaaagtgaaatttttgtgaaggacttaaattatccagtgtttctttagccttggtgaactatgaaatacgaaggccttaattttgtacaataaacttttatttgtattctgtgcaaaaaaaaaaaaaaaaaaaaaaaaaaaaaa

SEQ ID NO: 615 - DNA, 392 bp, Artificial Sequence
  Description of Artificial sequences:primer
  misc_feature (1)..(392): 3' terminal sequence from clone image:284640. chitinase 3-like 2(CHI3L2) gene.
  misc_feature (363)..(363): n is a, c, g, or t
tttttttttttttttttttttttttttttactggagcaaaatgaattttttttattgtacttcagggcaacaagtcaacagctgcaggaaaacaaaaccaggtccaatctatgatctaagaggaagtcaggaaaggcttggaagagagatccaaaggccggcctggcaaggggaatcccacatgagaattcctgggagagagcaggccccaggcagcaaggtcatcttgcctgcttctctgtaagttaatccttcacagggagccaaggcttctcttgactgcttggacaagagggtaagggccctggttgcaggatttgccagtgaagtcatccattgtcaatagaccagatcatggctccncccaggtttaaaatctttaagaactggaa

SEQ ID NO: 616 - DNA, 1418 bp, Artificial Sequence
  Description of Artificial sequences:primer
  misc_feature (1)..(1418): chitinase 3-like 2(CHI3L2) gene.
agaagaagctggccaaggatatgggagcaaccaccatggaccagaagtctctctgggcaggtgtagtggtcttgctgcttctccagggaggatctgcctacaaactggtttgctactttaccaactggtcccaggaccggcaggaaccaggaaaattcacccctgagaatattgaccccttcctatgctctcatctcatctattcattcgccagcatcgaaaacaacaaggttatcatcaaggacaagagtgaagtgatgctctaccagaccatcaacagtctcaaaaccaagaatcccaaactgaaaattctcttgtccattggagggtacctgtttggttccaaagggttccaccctatggtggattcttctacatcacgcttggaattcattaactccataatcctgtttctgaggaaccataactttgatggactggatgtaagctggatctacccagatcagaaagaaaacactcatttcactgtgctgattcatgagttagcagaagcctttcagaaggacttcacaaaatccaccaaggaaaggcttctcttgactgcgggcgtatctgcagggaggcaaatgattgataacagctatcaagttgagaaactggcaaaagatctggatttcatcaacctcctgtcctttgacttccatgggtcttgggaaaagccccttatcactggccacaacagccctctgagcaaggggtggcaggacagagggccaagctcctactacaatgtggaatatgctgtggggtactggatacataagggaatgccatcagagaaggtggtcatgggcatccccacatatgggcactccttcacactggcctctgcagaaaccaccgtgggggcccctgcctctggccctggagctgctggacccatcacagagtcttcaggcttcctggcctattatgagatctgccagttcctgaaaggagccaagatcacgcgcctccaggatcagcaggttccctacgcagtcaaggggaaccagtgggtgggctatgatgatgtgaagagtatggagaccaaggttcagttcttaaagaatttaaacctgggaggagccatgatctggtctattgacatggatgacttcactggcaaatcctgcaaccagggcccttaccctcttgtccaagcagtcaagagaagccttggctccttgtgaaggattaacttacagagaagcaggcaagatgaccttgctgcctggggcctgctctctcccaggaattctcatgtgggattccccttgccaggctggcctttggatctctcttccaagcctttcctgacttcctcttagatcatagattggacctggttttgttttcctgcagctgttgacttgttgccctgaagtacaataaaaaaaattcattttgctccagta

SEQ ID NO: 617 - DNA, 256 bp, Artificial Sequence
  Description of Artificial sequences:primer
  misc_feature (1)..(256): 3' terminal sequence from clone image:284828. atp-binding cassette, sub-family a (abc1), member 8(ABCA8) gene.
  misc_feature (254)..(254): n is a, c, g, or t
tttcaaaactatatatatgagatttatttcacattttctacctactcagtcatgtgagctgttgctacatttgtgaactttctgaaaccaagtgacaaatatccacaaaagatcatttacaatgtagacatcactaaagtctagatttaaaagtccagtgaaaatggcacacagttggcttacagaaataaaaaagtacaatatatttgaaatagtagggtttttgttttccatttatgcctacatcatggtgnta

SEQ ID NO: 618 - DNA, 5677 bp, Artificial Sequence
  Description of Artificial sequences:primer
  misc_feature (1)..(5677): atp-binding cassette, sub-family a (abc1), member 8(ABCA8) gene.
cagaagtcaaatagttaaagcaaattctagatacatggtagagaccaggagaaaatatgaataactttcttctaaacaaggagctcagtggataaaccatacctctagattccttgcttccattttcccagaaacaagatgaggaagagaaagatcagtgtgtgtcaacaaacttgggccttattatgcaagaactttcttaaaaaatggagaatgaaaagagagtccttaatggaatggctgaattcattgctcctactactttgtttgtatatatatcctcatagtcatcaagtaaatgatttttcttcactgcttaccatggacctgggacgggtagatacatttaatgaatccagattttctgttgtatacacacctgtcaccaacacgacccaacagataatgaataaagtagcctctactcccttcctggcaggtaaagaggtcttgggactgccagatgaggaaagtattaaagaattcacagcaaattatcctgaagaaatagtaagagtcacctttactaatacatactcatatcatttgaagttcttgctaggacatggaatgccagcaaagaaggagcacaaggaccatacagctcattgttatgaaacaaatgaagatgtttactgtgaagtttcagtattttggaaggaaggttttgtggctcttcaagctgccattaatgctgctattatagaaatcacaacaaatcactcagtgatggaggagctgatgtcagttactggaaaaaatatgaagatgcattccttcattggtcaatcaggagttataactgatttgtaccttttttcctgcattatttcattttcctcattcatttactatgcatctgttaatgtcacaagagagaggaaaaggatgaaggccttgatgacaatgatgggtcttcgggattcagcgttctggctctcctggggtttgctctatgctggtttcatcttcattatggcccttttcttggcacttgttataagatctacccagtttatcattttgtctggcttcatggtagtcttcagcctctttctcctgtatggattatctttggtagctttggctttcttaatgagcatcttggtaaagaaatctttcctcaccggcctggtcgtgttcctcctcactgtcttttgggggtgtctggggttcacatcactgtacagacaccttcctgcatccttggagtggattttaagcttgcttagtccctttgccttcatgcttggaatggcccagcttttacacttggactatgatttgaattctaatgcatttcctcatccatcggacggctcaaatctcattgtagcaacaaatttcatgttggcatttgacacttgcctctatctggcattggcgatttactttgaaaaaattttgccaaatgaatatggacatcgacgtccacctttgtttttcctgaagtcctcattttggtctcaaacacaaaagactgatcacgtggcccttgaagatgaaatggatgccgatccttcatttcatgactcttttgaacaagcgcctccagaattccaagggaaagaagccatcagaatcagaaatgttacaaaagaatataaaggaaagcctgataaaatagaagccttgaaagatctggtatttgacatttacgaaggccaaatcactgcaatacttggtcacagtggagctggaaagtcaacactgctaaacattcttagtgggttgtctgttcccaccaaaggttcagtcaccatctataacaataagctttcagaaatggctgacctagaaaatctcagcaagctgaccggagtttgtccacaatccaatgtgcaatttgacttcctcactgtaagagaaaacctcagactctttgctaaaataaaagggattctgccacaagaagtggataaagagattttcctgttggatgaaccaactgctggattggatcccttttcaagacaccaagtatggaaccttctgaaagaacgcaaaacagaccgcgtgatcctcttcagtacccagttcatggatgaggccgacatcctggcggacaggaaagtatttctctcccaagggaagctaaagtgcgcgggctcttctttgtttctaaagaagaaatgggggattggatatcacttaagcttgcagttaaatgaaatatgtgttgaggaaaacataacatcacttgttaaacagcacatccctgatgccaaattatcagccaaaagcgaaggaaaacttatttatacattacccttagaaagaacaaataaatttccagaactttacaaggatcttgatagctatcctgacctaggaattgagaattatggtgtttccatgacaactttgaatgaagtattcctgaagctagaaggaaaatctacaattaatgaatcggacattgctattttgggagaagtacaagcggaaaaagctgacgacactgaaaggcttgttgagatggaacaagtcctctcttcacttaacaagatgagaaagacaataggtggtgtggctctctggcgacagcaaatctgcgcaattgcaagggttcgcttgttaaagttaaagcatgaaagaaaagctcttttagcactgctattaattctaatggctggattttgccctcttcttgtggagtataccatggtgaaaatatatcaaaacagttacacctgggaactttctcctcatttgtatttccttgctcctggacaacaaccacatgaccctctcactcaactactgatcatcaataaaacaggggcaagcattgatgactttatacagtctgtggagcaccagaacatagctttagaagtggatgcatttggaactagaaatggcacagatgacccatcttataatggagccatcacagtgtgttgtaatgaaaagaattacagcttttcgttagcatgcaatgccaaaagattgaattgcttcccagttcttatggacattgttagtaatgggctacttggaatggttaaaccatcagtacatatccgaactgaaagaagtacatttttggagaatggacaggacaatccaatcggattcctggcatatatcatgttctggctggttttaacatcgagttgcccaccttacattgccatgagcagcatcgatgattataagaacagagctcggtcccagctacggatttccggactctccccttctgcttactggtttgggcaggcgctggtggatgtttccctgtacttcttggtcttcgtttttatatatttaatgagctacatttcaaacttcgaagacatgctacttacaataattcatattattcaaatcccatgtgctgttggttattccttttccctcatcttcatgacatacgtgatttccttcatctttcgcaaggggagaaaaaatagtggcatttggtcattttgtttctatgttgtcactgtattctctgtggctggatttgcgttcagtatcttcgaaagtgatattccatttatcttcacttttttaataccacctgccacaatgattggctgtttgttcttatcttctcatcttctcttttcttctctcttttctgaagaacgaatggatgtacagccatttctggtattcctaattcctttccttcattttatcatttttctttttactcttcgatgtctggaatggaagtttggaaagaaatcaatgagaaaggatcctttctttagaatttctccaagaagtagtgatgtgtgtcaaaatccagaagaaccagaaggagaggatgaagatgttcagatggaaagagtgagaacagcaaatgccttgaattctactaattttgatgagaagccagtcatcattgccagctgtctacgcaaggagtatgcagggaagaggaaaggctgtttttccaagaggaagaataagatagccacgagaaatgtctccttctgtgttagaaaaggtgaagttttaggattattaggacacaatggagctggtaaaagcacatccattaaggtgataactggagacacaaaaccaactgctggacaagtgctactgaaagggagcggtggaggggatgccctggagttcctggggtactgccctcaggagaacgcgctgtggcccaacctgacagtgaggcagcacctggaggtgtacgccgccgtgaaagggctgaggaaaggggatgctgaggttgccatcacacggttagtggatgcgctcaagctgcaggaccagctgaagtctccggtgaagaccttgtcagagggaataaagagaaagctgtgctttgtcctgagcatactggggaacccgtcagtggtgcttctggatgagccgtcgaccgggatggaccccgaggggcagcagcaaatgtggcaggccatccgggccacctttagaaacacggaaaggggtgccctcctaaccacccactacatggcagaggctgaggccgtgtgtgaccgagtggccatcatggtatctgggaggttgagatgtatcggttccatccaacacctgaaaagcaaatttggcaaagattacctgctggagatgaaggtgaagaacctggcacaagtggagcccctccatgcagagatcctgaggcttttcccccaggctgctcggcaggaaaggtactcctctctgatggtttataagttgccagtggaagatgtgcaacctttagcccaagctttcttcaaattagagaaggttaaacagagctttgacctagaggagtacagcctctcacagtctaccctggagcaggttttcctggagctctccaaggagcaggagctgggtgattttgaggaggattttgatccctcagtgaagtggaagctcctcccccaggaagagccttaaaaccccaaattctgtgttcctgtttaaacccgtggttttttttaaatacatttatttttatagcagcaatgttctatttttagaaactatattataagtacagaaatggttctccgtgtggtgggaggaggaggttcgggtgctgggtaagtgccatgtcagtgtggacagaggcatttgactaagccaacctcctctcacagcctctgtatctctgcaggccatactggttccattgttctgtataatactgaataaataaatttacttttacatgatcgtataagtttctagataagataaacaaattctgtttaaatttttttaataaaaatcttaaaacactttttttctaacctagactgagaaattcatgtttacttttctaggtgtatgatactttgtaaagttgatactttcctaagaatttaacatgtcatatttttgaaatagatttaagtgtgcttcttattgctaaaaatactaaatgtcatgggtcatagtatctgatatcaatatcgttgataacatatccacaggtaacaccatgatgtaggcataaatggaaaacaaaaaccctactatttcaaatatattgtacttttttatttctgtaagccaactgtgtgccattttcactggacttttaaatctagactttagtgatgtctacattgtaaatgatcttttgtggatatttgtcacttggtttcagaaagttcacaaatgtagcaacagctcacatgactgagtaggtagaaaatgtgaaataaatctcatatatatagttttg

SEQ ID NO: 619 - DNA, 451 bp, Artificial Sequence
  Description of Artificial sequences:primer
  misc_feature (1)..(451): 3' terminal sequence from clone image:28577. btb (poz) domain containing 1(BTBD1) gene.
  misc_feature (160)..(160): n is a, c, g, or t
  misc_feature (209)..(209): n is a, c, g, or t
  misc_feature (400)..(400): n is a, c, g, or t
  misc_feature (420)..(420): n is a, c, g, or t
  misc_feature (435)..(435): n is a, c, g, or t
  misc_feature (446)..(446): n is a, c, g, or t
ttttttttttatatatatatatatttatttatttttaaaaactccaggggatgtcccaaagttagtaaacagttctgtttcttgtcccttttatggctgcatgcagtttcaattgttcagtacaacagatgaggcatttaaaaggtctccaacgtcaagnaaacactaactcatctctggacatatcatattttttaaggacaggaagntattttctgttaatgggttactacaggaggtgtttactgggttaatttttaggttaaccaggaaccacacatcccataggataattccatttaactgagggtttatatccgttaggaggcattaccatgggaaaaatttccctttgggcaatttcagggggaccttcgggcccacccaatataccctaccnttctttaccattttaagggnggaatttttactttngggtgggaaanttttt

SEQ ID NO: 620 - DNA, 393 bp, Artificial Sequence
  Description of Artificial sequences:primer
  misc_feature (1)..(393): 5' terminal sequence from clone image:28577. btb (poz) domain containing 1(BTBD1) gene.
  misc_feature (349)..(349): n is a, c, g, or t
  misc_feature (369)..(369): n is a, c, g, or t
  misc_feature (383)..(383): n is a, c, g, or t
tcagattcacagttaatagaaggatctctatagttggatttggcttgtatggatctattcatggccctacagattatcaagtgaatatacagatcattgaatatgagaaaaagcaaaccctgggacagaatgataccggctttagttgtgatgggacagctaacacattcagggtcatgttcaaggaacccatagagatcctgcccaatgtgtgctacacagcatgtgcaacactcaaaggtccagattcccactatgggcacaaaaggattgaaggaaagtagtgcatgaggacacctgctggcaagcaaggactgtttttttcttttttagttcccctgggcattantaatggggcactttcattangaaggtgggacaantttcccggaa

SEQ ID NO: 621 - DNA, 3177 bp, Artificial Sequence
  Description of Artificial sequences:primer
  misc_feature (1)..(3177): btb (poz) domain containing 1(BTBD1) gene.
ggaggcagcgccggcctccggaggcggcctgggcgatggcggcggagttttgtccataacctgggcaaccgcgcagctggaggatggcctcactcgggcctgccgcagctggggagcaggcgtcgggggctgaggcggagccgggccccgcggggccgccgccgccgccctcaccgtcctctctggggcccctgctccccctgcagcgggaacctctctacaactggcaggcgaccaaggcgtcgctgaaggagcgcttcgccttcctcttcaactcggagctgctgagcgatgtgcgcttcgtactgggcaagggtcgcggcgccgccgccgctgggggcccgcagcgcatccccgcccaccgcttcgtgctggcggccggcagcgccgtctttgacgccatgttcaacggcggcatggccaccacgtcggccgagatcgagctgccggacgtggagcccgcagccttcctggcgctgctgagatttctatattcagatgaagttcaaattggtccagaaacagttatgaccactctttatactgccaagaaatacgcagtcccagccttggaagcacactgtgtagaatttctcaccaaacatcttagggcagataatgcctttatgttacttactcaggctcgattatttgatgaacctcagcttgctagtctttgtctagatacaatagacaaaagcacaatggatgcaataagtgcagaagggtttactgatattgatatagatacactctgtgcagttttagagagagacacactcagtattcgagaaagtcgactttttggagctgttgtacgctgggcagaagcagaatgtcagagacaacaattacctgtgacttttgggaataaacaaaaagttctaggaaaagcactttccttaatccggttcccactgatgacaattgaggaatttgcagcaggtcctgctcaatctggaattttgtcagatcgtgaagtggtaaacctctttcttcattttactgtcaaccctaaaccccgagttgaatacattgaccgaccaagatgctgtctcaggggaaaggaatgctgcatcaatagattccagcaagtagaaagccgctggggttacagtgggacgagtgatcgaatcagattcacagttaatagaaggatctctatagttggatttggcttgtatggatctattcatggccctacagattatcaagtgaatatacagatcattgaatatgagaaaaagcaaaccctgggacagaatgataccggctttagttgtgatgggacagctaacacattcagggtcatgttcaaggaacccatagagatcctgcccaatgtgtgctacacagcatgtgcaacactcaaaggtccagattcccactatggcacaaaaggattgaagaaagtagtgcatgagacacctgctgcaagcaagactgtttttttcttttttagttcccctggcaataataatggcacttcaatagaagatggacaaattccagaaatcatattttatacataatttagcattataatacatcttggctaaataataccatacaatctagtgtcaaaaacataaatggccacaaaaaagtagtttgagtgttatgaatatttaaaattgtaagataagaaacagtttcttagagcagatagaaaaatgcttatttaaatctttgcatgatttaaaaacagattttccattttcttacaactttaagagaaaagaactgggtttaatggtttaaaaaaaagcacagctttttcaccttcatcttgtataatttcatagattggctgacttagggtctttcaatagtttgggaattgaaagattcttgttatatatagctagtttgggtttgtttttgttttaactattttgaaggttaggtgagatgggcaaataggcttaactattttgaaggttggatgaaaagagatgggtcagtattcctacagaattcttattaactcaaataactaaatttcagaaaattaagaagctgactttatatttggtggtttgaagtatcttgttgttagcatttgtaataatgctaaaaaaggcctaataaaatgcccaagaaaatattcagtgcatttatagagaaggatattttgtagtagtatagtaatgtgttatgtagtacagttttaaagctataaatggaattttgtgtaaattcacaaaaatgtgatataaacaggatctaagactggattccctgtcactaaactgcaccactatacctgtctctctgtgtgggggacactgctgatgattcccaagattgagatgatgacggtgatgacgactgggtgaacagccatcacttcaacattgtgataatccttcacagcaagaaaccgaataaaatactaacatttctaacaactgctctgacattgtaaagagatccaacagaatcactcctgctgaaaaatacgctttctgccacctacacatttctatttaggaagtaaaatttgcttcatggtcatgaccccattagtcagtgttacagctgtgttggggataggaagtatatctggcagattgacatttatacacttttttataaagcagattttaaaatatagtaacatccatttttttcccttgaaagtgattctcttataaaaaatgaaagtggagtttaaggtatatcaaatcgttgtggaaggtgattaaaaatcaaaattcttttaaatatcaacttaattttttctaagtaagatacaaaaaattttcatctaaagtaatatttcactttatattgtaaagaaggtaggtatattggtggctgaggtctcttgaaattgctaaagggaaatttttctatggtaatgctcttacggatataagcctcagttaaatggaattatctatgggatgtgtggttctggttaactaaaaattaaccagtaaacactctgtagtaaccattacagaaaatacttctgccttaaaaaatatgatatgccagagatgagttagtgtttcttgacgttggagacctataaatgcctcatctgttgtactgaacaattgaaactgcatgcagccataaaagggacaagaaacagaactgtttactaactttgggacatcccctggagtttttaaaaataaataaatatatatatatataaaaaaaaaa

SEQ ID NO: 622 - DNA, 290 bp, Artificial Sequence
  Description of Artificial sequences:primer
  misc_feature (1)..(290): 3' terminal sequence from clone image:285780. matrix metalloproteinase 13 (collagenase 3)(MMP13) gene.
ctgttgaaaatatatttttattataaacaacataaacacttcctaatacactttgcaaatatgcatttcattttctttgcctgagtttttatcaacagtgtctctgagcacaatagttcttcccttgatggccgatcatatattcaataagtgccaagcaccctccccaagtatcaataggcactgtgggaagtgctgggggatttttttaaatgcagagaaaaaaaggcatccttccatatctcaagggatcacaatctagtagactgctttaaaaaaaaatttggatg

SEQ ID NO: 623 - DNA, 2722 bp, Artificial Sequence
  Description of Artificial sequences:primer
  misc_feature (1)..(2722): matrix metalloproteinase 13 (collagenase 3)(MMP13) gene.
caacagtccccaggcatcaccattcaagatgcatccaggggtcctggctgccttcctcttcttgagctggactcattgtcgggccctgccccttcccagtggtggtgatgaagatgatttgtctgaggaagacctccagtttgcagagcgctacctgagatcatactaccatcctacaaatctcgcgggaatcctgaaggagaatgcagcaagctccatgactgagaggctccgagaaatgcagtctttcttcggcttagaggtgactggcaaacttgacgataacaccttagatgtcatgaaaaagccaagatgcggggttcctgatgtgggtgaatacaatgttttccctcgaactcttaaatggtccaaaatgaatttaacctacagaattgtgaattacacccctgatatgactcattctgaagtcgaaaaggcattcaaaaaagccttcaaagtttggtccgatgtaactcctctgaattttaccagacttcacgatggcattgctgacatcatgatctcttttggaattaaggagcatggcgacttctacccatttgatgggccctctggcctgctggctcatgcttttcctcctgggccaaattatggaggagatgcccattttgatgatgatgaaacctggacaagtagttccaaaggctacaacttgtttcttgttgctgcgcatgagttcggccactccttaggtcttgaccactccaaggaccctggagcactcatgtttcctatctacacctacaccggcaaaagccactttatgcttcctgatgacgatgtacaagggatccagtctctctatggtccaggagatgaagaccccaaccctaaacatccaaaaacgccagacaaatgtgacccttccttatcccttgatgccattaccagtctccgaggagaaacaatgatctttaaagacagattcttctggcgcctgcatcctcagcaggttgatgcggagctgtttttaacgaaatcattttggccagaacttcccaaccgtattgatgctgcatatgagcacccttctcatgacctcatcttcatcttcagaggtagaaaattttgggctcttaatggttatgacattctggaaggttatcccaaaaaaatatctgaactgggtcttccaaaagaagttaagaagataagtgcagctgttcactttgaggatacaggcaagactctcctgttctcaggaaaccaggtctggagatatgatgatactaaccatattatggataaagactatccgagactaatagaagaagacttcccaggaattggtgataaagtagatgctgtctatgagaaaaatggttatatctattttttcaacggacccatacagtttgaatacagcatctggagtaaccgtattgttcgcgtcatgccagcaaattccattttgtggtgttaagtgtctttttaaaaattgttatttaaatcctgaagagcatttggggtaatacttccagaagtgcggggtaggggaagaagagctatcaggagaaagcttggttctgtgaacaagcttcagtaagttatctttgaatatgtagtatctatatgactatgcgtggctggaaccacattgaagaatgttagagtaatgaaatggaggatctctaaagagcatctgattcttgttgctgtacaaaagcaatggttgatgatacttcccacaccacaaatgggacacatggtctgtcaatgagagcataatttaaaaatatatttataaggaaattttacaagggcataaagtaaatacatgcatataatgaataaatcattcttactaaaaagtataaaatagtatgaaaatggaaatttgggagagccatacataaaagaaataaaccaaaggaaaatgtctgtaataatagactgtaacttccaaataaataattttcattttgcactgaggatattcagatgtatgtgcccttcttcacacagacactaacgaaatatcaaagtcattaaagacaggagacaaaagagcagtggtaagaatagtagatgtggcctttgaattctgtttaattttcacttttggcaatgactcaaagtctgctctcatataagacaaatattcctttgcatattataaaggataaagaaggatgatgtctttttattaaaatatttcaggttcttcagaagtcacacattacaaagttaaaattgttatcaaaatagtctaaggccatggcatccctttttcataaattatttgattatttaagactaaaagttgcattttaaccctattttacctagctaattatttaattgtccggtttgtcttggatatataggctattttctaaagacttgtatagcatgaaataaaatatatcttataaagtggaagtatgtatattaaaaaagagacatccaaatttttttttaaagcagtctactagattgtgatcccttgagatatggaaggatgcctttttttctctgcatttaaaaaaatcccccagcacttcccacagtgcctattgatacttggggagggtgcttggcacttattgaatatatgatcggccatcaagggaagaactattgtgctcagagacactgttgataaaaactcaggcaaagaaaatgaaatgcatatttgcaaagtgtattaggaagtgtttatgttgtttataataaaaatatattttcaacagaaaaaaaa

SEQ ID NO: 624 - DNA, 563 bp, Artificial Sequence
  Description of Artificial sequences:primer
  misc_feature (1)..(563): 3' terminal sequence from clone image:28596. phosphoribosylglycinamide formyltransferase, phosphoribosylglycinamide synthetase, phosphoribosylaminoimidazole synthetase(GART) gene.
  misc_feature (304)..(304): n is a, c, g, or t
  misc_feature (414)..(414): n is a, c, g, or t
  misc_feature (452)..(452): n is a, c, g, or t
  misc_feature (463)..(463): n is a, c, g, or t
  misc_feature (473)..(473): n is a, c, g, or t
  misc_feature (495)..(495): n is a, c, g, or t
  misc_feature (507)..(507): n is a, c, g, or t
  misc_feature (525)..(525): n is a, c, g, or t
tttttttttcaaaagagaaatgatttgtcagggagccattcttcaacactgacccatttatttgcatgctttcaatcagattcttgactttcacacgtggggaaccttcagctcgtgcaaccacactgccaatcacccaggcttcttccttgtgctgctggatacccctcagaatctgctctgtctgctcctttgataccacaaggacagcgccaaccccacagttaaatgttctggccatctcttcctcagagaggtgtccttcctgctgcaaccatgagaagaccctggggatcctccaggnctgggcatctaaatctaccccaagtttctcagggaggactctggggatgttctctagtaatcctccaccagtaatatgggcaaaggctttgacatgtcctgaacgtaggncaggtaacagtgaatggctgtagattctggtaggcgtnagaagtaaggnccctaaagtntgggcaccacaaccatcaggtnctggagaggagncttgagggaaggtttttncacggtttttctcacaaggtaaatccattgctttgagg

SEQ ID NO: 625 - DNA, 514 bp, Artificial Sequence
  Description of Artificial sequences:primer
  misc_feature (1)..(514): 5' terminal sequence from clone image:28596. phosphoribosylglycinamide formyltransferase, phosphoribosylglycinamide synthetase, phosphoribosylaminoimidazole synthetase(GART) gene.
  misc_feature (376)..(376): n is a, c, g, or t
  misc_feature (385)..(385): n is a, c, g, or t
  misc_feature (419)..(419): n is a, c, g, or t
  misc_feature (432)..(432): n is a, c, g, or t
  misc_feature (443)..(443): n is a, c, g, or t
  misc_feature (448)..(448): n is a, c, g, or t
  misc_feature (480)..(480): n is a, c, g, or t
  misc_feature (512)..(512): n is a, c, g, or t
aagttctagagtttaattgccgttttggtgatccagagtgccaagtaatcctcccacttcttaaaagtgatctttatgaagtgattcagtccaccttagatggactgctctgcacatctctgcctgtttggctagaaaaccacaccgccctaactgttgtcatggcaagtaaaggttatcctggagactacaccaagggttagaggataacagggtttcctgaggctcaagctctaggactggaggtgttccatgcaggcactgcccttcaaaaatgggcaaagtagtaactcatggggggtaggagttcttgcagtcacagccatccggggaaaatcttcatatccagcccttgagggaaggccaagaaagggantaggctggnattaaagttttgaggggagccatttattaggggnaaggacatcgggntttcgtggccntaggntttccttccaggcagcccaggggggttttgantttaccaagggattttgggagttaggttttcngc

SEQ ID NO: 626 - DNA, 3300 bp, Artificial Sequence
  Description of Artificial sequences:primer
  misc_feature (1)..(3300): phosphoribosylglycinamide formyltransferase, phosphoribosylglycinamide synthetase, phosphoribosylaminoimidazole synthetase(GART) gene.
cttccggcgagcgggcaagcgggaaccaggtggccacccggtgtcggtttcattttcctttggaatttctgctttacagacagaacaatggcagcccgagtacttataattggcagtggaggaagggaacatacgctggcctggaaacttgcacagtctcatcatgtcaaacaagtgttggttgccccaggaaacgcaggcactgcctgctctgaaaagatttcaaataccgccatctcaatcagtgaccacactgcccttgctcaattctgcaaagagaagaaaattgaatttgtagttgttggaccagaagcacctctggctgctgggattgttgggaacctgaggtctgcaggagtgcaatgctttggcccaacagcagaagcggctcagttagagtccagcaaaaggtttgccaaagagtttatggacagacatggaatcccaaccgcacaatggaaggctttcaccaaacctgaagaagcctgcagcttcattttgagtgcagacttccctgctttggttgtgaaggccagtggtcttgcagctggaaaaggggtgattgttgcaaagagcaaagaagaggcctgcaaagctgtacaagagatcatgcaggagaaagcctttggggcagctggagaaacaattgtcattgaagaacttcttgacggagaagaggtgtcgtgtctgtgtttcactgatggcaagactgtggcccccatgcccccagcacaggaccataagcgattactggagggagatggtggccctaacacagggggaatgggagcctattgtccagcccctcaggtttctaatgatctattactaaaaattaaagatactgttcttcagaggacagtggatggcatgcagcaagagggtactccatatacaggtattctctatgctggaataatgctgaccaagaatggcccaaaagttctagagtttaattgccgttttggtgatccagagtgccaagtaatcctcccacttcttaaaagtgatctttatgaagtgattcagtccaccttagatggactgctctgcacatctctgcctgtttggctagaaaaccacaccgccctaactgttgtcatggcaagtaaaggttatcctggagactacaccaagggtgtagagataacagggtttcctgaggctcaagctctaggactggaggtgttccatgcaggcactgccctcaaaaatggcaaagtagtaactcatgggggtagagttcttgcagtcacagccatccgggaaaatctcatatcagcccttgaggaagccaagaaaggactagctgctataaagtttgagggagcaatttataggaaagacgtcggctttcgtgccatagctttcctccagcagcccaggagtttgacttacaaggaatctggagtagatatcgcagctggaaatatgctggtcaagaaaattcagcctttagcaaaagccacttccagatcaggctgtaaagttgatcttggaggttttgctggtctttttgatttaaaagcagctggtttcaaagatccccttctggcctctggaacagatggcgttggaactaaactaaagattgcccagctatgcaataaacatgataccattggtcaagatttggtagcaatgtgtgttaatgatattctggcacaaggagcagagcccctcttcttccttgattacttttcctgtggaaaacttgacctcagtgtaactgaagctgttgttgctggaattgctaaagcttgtggaaaagctggatgtgctctccttggaggtgaaacagcagaaatgcctgacatgtatccccctggagagtatgacctagctgggtttgccgttggtgccatggagcgagatcagaaactccctcacctggaaagaatcactgagggtgatgttgttgttggaatagcttcatctggtcttcatagcaatggatttagccttgtgaggaaaatcgtggcaaaatcttccctccagtactcctctccagcacctgatggttgtggtgaccagactttaggggacttacttctcacgcctaccagaatctacagccattcactgttacctgtcctacgttcaggacatgtcaaagcctttgcccatattactggtggaggattactagagaacatccccagagtcctccctgagaaacttggggtagatttagatgcccagacctggaggatccccagggtcttctcatggttgcagcaggaaggacacctctctgaggaagagatggccagaacatttaactgtggggttggcgctgtccttgtggtatcaaaggagcagacagagcagattctgagggatatccagcagcacaaggaagaagcctgggtgattggcagtgtggttgcacgagctgaaggttccccacgtgtgaaagtcaagaatctgattgaaagcatgcaaataaatgggtcagtgttgaagaatggctccctgacaaatcatttctcttttgaaaaaaaaaaggccagagtggctgtcttaatatctggaacaggatcgaacctgcaagcacttatagacagtactcgggaaccaaatagctctgcacaaattgatattgttatctccaacaaagccgcagtagctgggttagataaagcggaaagagctggtattcccactagagtaattaatcataaactgtataaaaatcgtgtagaatttgacagtgcaattgacctagtccttgaagagttctccatagacatagtctgtcttgcaggattcatgagaattctttctggcccctttgtccaaaagtggaatggaaaaatgctcaatatccacccatccttgctcccttcttttaagggttcaaatgcccatgagcaagccctggaaaccggagtcacagttactgggtgcactgtacactttgtagctgaagatgtggatgctggacagattattttgcaagaagctgttcccgtgaagaggggtgatactgtcgcaactctttctgaaagagtaaaattagcagaacataaaatatttcctgcagcccttcagctggtggccagtggaactgtacagcttggagaaaatggcaagatctgttgggttaaagaggaatgaagccttttaattcagaaatggggccagtttagaaagaattatttgctgtttgcatggtggttttttatcatggacttggcccaaaagaaaaactgctaaaagacaaaaaagacctcacccttacttcatctatttttttaataaatagagactcactaaaaaaaaaaaaaaaaaaaaaaa

SEQ ID NO: 627 - DNA, 436 bp, Artificial Sequence
  Description of Artificial sequences:primer
  misc_feature (1)..(436): 3' terminal sequence from clone image:286287. cullin 2(CUL2) gene.
  misc_feature (275)..(275): n is a, c, g, or t
  misc_feature (429)..(429): n is a, c, g, or t
  misc_feature (436)..(436): n is a, c, g, or t
ctttattttttttttatttgacaagcagcagtatcatgtttgtcattttaatgtagatacaattattaggttatctgtcatattacaatatttaagtttttaaattttatgtcctttaagatacattaaaaaaaaaaaaaaagacacatcaactgcaaacgtgaaggggagaaaaagcatggtacccaaccgaatttccacttttcagcaatacttcactcattcttttaataaagttttaagaaatgtcataatgacatgagcttgaaatatcnctaggcattttctttgacgctcatgacgtggcactggtgatgttgtaaacagcagaaaacaggggctggccaaatggaccaaatttatgggagggcacagtcctggctttttcccacaggaacacaccaaatgggggatgggcaatgatcttcncacaccn

SEQ ID NO: 628 - DNA, 2910 bp, Artificial Sequence
  Description of Artificial sequences:primer
  misc_feature (1)..(2910): cullin 2(CUL2) gene.
ggcggcggccggccggggaggcggcctcggcgcacagtaatggcagcgctgtgagcaggggaacgcgagctgacagccgccgccgccgccgcctccgcccaccttcctcgccggggcttcgtctttcactccttcgggctgcctccccctccccttgtcccctgccccttgccctgcttctgcagaagatttcaacactacacttgcacaatgtctttgaaaccaagagtagtagattttgatgaaacatggaacaaacttttgacgacaataaaagccgtggtcatgttggaatacgtcgaaagagcaacatggaatgaccgtttctcagatatctatgctttatgtgtggcctatcctgaaccccttggagaaagactttatacagaaactaagatttttttggaaaatcatgttcggcatttgcataagagagttttggagtcagaagaacaagtacttgttatgtatcataggtactgggaagaatacagcaagggtgcagactatatggactgcttatataggtatctcaacacccagtttattaaaaagaataaattaacagaagcggaccttcagtatggctatggtggtgtagatatgaatgaaccacttatggaaataggagagctagcattggatatgtggaggaaattgatggttgaaccacttcaggccatccttatccgaatgctgctccgagaaatcaaaaatgatcgtggtggagaagacccaaaccagaaagtaatccatggggttattaactcctttgttcatgttgaacagtataagaaaaaattccccttaaagttttatcaggaaatttttgagtctccctttctgactgaaacaggagagtattacaaacaagaagcttcaaatttattacaagaatcaaactgctcacagtatatggaaaaggttctaggtagattaaaagatgaagaaattcgatgtcgaaaatacctacatccaagttcatatactaaggtgattcatgaatgtcaacaacgaatggtagcagaccacttacagtttttacatgcagaatgtcataatataattcgacaagagaaaaaaaatgacatggcaaatatgtacgtcttactccgtgctgtgtccactggtttacctcatatgattcaggagctgcaaaaccacatccatgatgagggccttcgagcaaccagcaaccttactcaggaaaacatgccaacactatttgtggagtcagttttggaagtgcatggtaaatttgttcagcttatcaacactgttttgaatggtgatcagcattttatgagtgcgttggataaggcccttacgtcagttgtaaattacagagaacctaagtctgtttgcaaagcacctgaactgcttgctaagtactgtgacaacttactgaagaagtcagcgaaagggatgacagagaatgaagtggaagacaggctcacgagcttcatcacagtgttcaaatacattgatgacaaggacgtctttcaaaagttctacgcaagaatgctggcaaaacgtttaattcatgggttatccatgtctatggactctgaagaagccatgatcaacaaattaaagcaagcctgtggttatgagtttaccagcaagctacatcggatgtatacagatatgagtgtcagcgctgatctcaacaataagttcaacaattttatcaaaaaccaagacacagtaatagatttgggaattagttttcaaatatatgttctacaggctggtgcgtggcctcttactcaggctccttcatctacgtttgcaattccccaggaattagaaaaaagtgtacagatgtttgaattattttatagccaacatttcagtggaaggaaacttacatggttacattatctgtgtacaggtgaagttaaaatgaactatttgggcaaaccatatgtagccatggttacaacataccaaatggcagttcttcttgcctttaacaacagtgaaactgtcagttataaagagcttcaggacagcactcagatgaatgaaaaggaactgacaaaaacaatcaaatcattacttgatgtgaaaatgattaaccatgattcagaaaaggaagatattgatgcagaatcttcgttttcattaaatatgaactttagcagtaaaagaacaaaatttaaaattactacatcaatgcagaaagacacaccacaagaaatggagcagactagaagtgcagttgatgaggaccggaaaatgtatctccaagctgctatagttcgtatcatgaaagcacgaaaagtgcttcggcacaatgcccttattcaagaggtgattagccagtcaagagctaggtttaatcccagtatcagcatgattaagaagtgtattgaagttctgatagacaaacaatacatagaacgcagccaggcgtcggcagatgaatacagctacgtcgcgtgatgtcgctctcctccagcgtggtgtgagaagatcattgccatcaccatttggtgtgttcctgtgggaaaaagcaggactgtgcctccataatttggtcatttggcagcccctgttttctgctgtttacaacatcaccagtgccacgtcatgagcgtcaaagaaaatgcctagagatatttcaagctcatgtcattatgacatttcttaaaactttattaaaagaatgagtgaagtattgctgaaaagtggaaattcggttgggtaccatgctttttctccccttcacgtttgcagttgatgtgtctttttttttttttttaatgtatcttaaaggacataaaatttaaaaacttaaatattgtaatatgacagataacctaataattgtatctacattaaaatgacaaacatgatactgctgcttgtcaaataaaaaaaaaaaaaaaaaaaaaaaaaaaaaaa

SEQ ID NO: 629 - DNA, 258 bp, Artificial Sequence
  Description of Artificial sequences:primer
  misc_feature (1)..(258): 3' terminal sequence from clone image:287843. glutamate receptor, metabotropic 3(GRM3) gene.
  misc_feature (173)..(173): n is a, c, g, or t
ttttagtagactgaccatgtcagaccctgtcaccaatgctcagctctgtaaacaatggttatttccatgttctgggggaattgttaataataggggcactagactcagcctagaaagttctagcacatcactatatacagtcctcaaaaataatttatcgtactgtttctaanaaaaaaggtactaggggttgttcttttgctctgtttccatattctggagctgcacgtgagcacttttggcttacaagtccaaaaa

SEQ ID NO: 630 - DNA, 3410 bp, Artificial Sequence
  Description of Artificial sequences:primer
  misc_feature (1)..(3410): glutamate receptor, metabotropic 3(GRM3) gene.
cttttgtgtcggatgaggaggaccaaccatgagccagagcccgggtgcaggctcaccgccgccgctgccaccgcggtcagctccagttcctgccaggagttgtcggtgcgaggaattttgtgacaggctctgttagtctgttcctcccttatttgaaggacaggccaaagatccagtttggaaatgagagaggactagcatgacacattggctccaccattgatatctcccagaggtacagaaacaggattcatgaagatgttgacaagactgcaagttcttaccttagctttgttttcaaagggatttttactctctttaggggaccataactttctaaggagagagattaaaatagaaggtgaccttgttttagggggcctgtttcctattaacgaaaaaggcactggaactgaagaatgtgggcgaatcaatgaagaccgagggattcaacgcctggaagccatgttgtttgctattgatgaaatcaacaaagatgattacttgctaccaggagtgaagttgggtgttcacattttggatacatgttcaagggatacctatgcattggagcaatcactggagtttgtcagggcatctttgacaaaagtggatgaagctgagtatatgtgtcctgatggatcctatgccattcaagaaaacatcccacttctcattgcaggggtcattggtggctcttatagcagtgtttccatacaggtggcaaacctgctgcggctcttccagatccctcagatcagctacgcatccaccagcgccaaactcagtgataagtcgcgctatgattactttgccaggaccgtgccccccgacttctaccaggccaaagccatggctgagatcttgcgcttcttcaactggacctacgtgtccacagtagcctccgagggtgattacggggagacagggatcgaggccttcgagcaggaagcccgcctgcgcaacatctgcatcgctacggcggagaaggtgggccgctccaacatccgcaagtcctacgacagcgtgatccgagaactgttgcagaagcccaacgcgcgcgtcgtggtcctcttcatgcgcagcgacgactcgcgggagctcattgcagccgccagccgcgccaatgcctccttcacctgggtggccagcgacggctggggcgcgcaggagagcatcatcaagggcagcgagcatgtggcctacggcgccatcaccctggagctggcctcccagcctgtccgccagttcgaccgctacttccagagcctcaacccctacaacaaccaccgcaacccctggttccgggacttctgggagcaaaagtttcagtgcagcctccagaacaaacgcaaccacaggcgcgtctgcgacaagcacctggccatcgacagcagcaactacgagcaagagtccaagatcatgtttgtggtgaacgcggtgtatgccatggcccacgctttgcacaaaatgcagcgcaccctctgtcccaacactaccaagctttgtgatgctatgaagatcctggatgggaagaagttgtacaaggattacttgctgaaaatcaacttcacggctccattcaacccaaataaagatgcagatagcatagtcaagtttgacacttttggagatggaatggggcgatacaacgtgttcaatttccaaaatgtaggtggaaagtattcctacttgaaagttggtcactgggcagaaaccttatcgctagatgtcaactctatccactggtcccggaactcagtccccacttcccagtgcagcgacccctgtgcccccaatgaaatgaagaatatgcaaccaggggatgtctgctgctggatttgcatcccctgtgaaccctacgaatacctggctgatgagtttacctgtatggattgtgggtctggacagtggcccactgcagacctaactggatgctatgaccttcctgaggactacatcaggtgggaagacgcctgggccattggcccagtcaccattgcctgtctgggttttatgtgtacatgcatggttgtaactgtttttatcaagcacaacaacacacccttggtcaaagcatcgggccgagaactctgctacatcttattgtttggggttggcctgtcatactgcatgacattcttcttcattgccaagccatcaccagtcatctgtgcattgcgccgactcgggctggggagttccttcgctatctgttactcagccctgctgaccaagacaaactgcattgcccgcatcttcgatggggtcaagaatggcgctcagaggccaaaattcatcagccccagttctcaggttttcatctgcctgggtctgatcctggtgcaaattgtgatggtgtctgtgtggctcatcctggaggccccaggcaccaggaggtatacccttgcagagaagcgggaaacagtcatcctaaaatgcaatgtcaaagattccagcatgttgatctctcttacctacgatgtgatcctggtgatcttatgcactgtgtacgccttcaaaacgcggaagtgcccagaaaatttcaacgaagctaagttcataggttttaccatgtacaccacgtgcatcatctggttggccttcctccctatattttatgtgacatcaagtgactacagagtgcagacgacaaccatgtgcatctctgtcagcctgagtggctttgtggtcttgggctgtttgtttgcacccaaggttcacatcatcctgtttcaaccccagaagaatgttgtcacacacagactgcacctcaacaggttcagtgtcagtggaactgggaccacatactctcagtcctctgcaagcacgtatgtgccaacggtgtgcaatgggcgggaagtcctcgactccaccacctcatctctgtgattgtgaattgcagttcagttcttgtgtttttagactgttagacaaaagtgctcacgtgcagctccagaatatggaaacagagcaaaagaacaaccctagtacctttttttagaaacagtacgataaattatttttgaggactgtatatagtgatgtgctagaactttctaggctgagtctagtgcccctattattaacaattcccccagaacatggaaataaccattgtttacagagctgagcattggtgacagggtctgacatggtcagtctactaaaaaacaaaaaaaaaaaacaaaaaaaaaaaaacaaaagaaaaaaataaaaatacggtggcaatattatgtaaccttttttcctatgaagttttttgtaggtccttgttgtaactaatttaggatgagtttctatgttgtatattaaagttacattatgtgtaacagattgattttctcagcacaaaataaaaagcatctgtattaatgtaaagatactgagaataaaaccttcaaggtttt

SEQ ID NO: 631 - DNA, 448 bp, Artificial Sequence
  Description of Artificial sequences:primer
  misc_feature (1)..(448): 3' terminal sequence from clone image:288874. carbonic anhydrase vii(CA7) gene.
  misc_feature (76)..(76): n is a, c, g, or t
  misc_feature (120)..(120): n is a, c, g, or t
  misc_feature (122)..(122): n is a, c, g, or t
gttgcatggatacattaatttattaattcaacagggatggactgtcatgtaggtggctttggtgactgggtgggcncaaggggagatactgtataagctatagccagggcctgcccgtgnancacggtggctggagggagaaggccacgtcacctccagcatgctgggtgctgattttaatggcctggcagtgaggtgcgtgcatggcagagctgcagaagaggtaatgccgagagggcagctctgccacctctaattattgcttgagtctctctggtagtgtcagctgcccgccccagggagctcagtctcctccatcacagtgtgcgctcggggtggggctgctgccacttgccagtggggaagaccagaggaggttcccagggtctttgggtcttggagagcagaggcagccccaggctttggaccctgcttaactcctgtcctt

SEQ ID NO: 632 - DNA, 270 bp, Artificial Sequence
  Description of Artificial sequences:primer
  misc_feature (1)..(270): 5' terminal sequence from clone image:288874. carbonic anhydrase vii(CA7) gene.
  misc_feature (25)..(26): n is a, c, g, or t
  misc_feature (49)..(49): n is a, c, g, or t
gcgacgatgagaggatccacatggnnaacaacttccggccaccacagcnactgaagggccgcgtggtaaaggcctccttccgggcctgagctgcccatctgcctagccggccactagggcaccatcttctcaagggcttccatgtcagcagacaccaaaccatctgaggcttcctccctggggggtgctggggaccctccttcagccagtttgctccttggtcaccctggaggcttctggatgggacccttgagtctggggcacccttca

SEQ ID NO: 633 - DNA, 1428 bp, Artificial Sequence
  Description of Artificial sequences:primer
  misc_feature (1)..(1428): carbonic anhydrase vii(CA7) gene.
atgaccggccaccacggctggggctacggccaggacgacggcccctcgcattggcacaagctgtatcccattgcccagggagatcgccaatcacccatcaatatcatctccagccaggctgtgtactctcccagcctgcaaccactggagctttcctatgaggcctgcatgtccctcagcatcaccaacaatggccactctgtccaggtagacttcaatgacagcgatgaccgaaccgtggtgactgggggccccctggaagggccctaccgcctcaagcagtttcacttccactggggcaagaagcacgatgtgggttctgagcacacggtggacggcaagtccttccccagcgagctgcatctggttcactggaatgccaagaagtacagcacttttggggaggcggcctcagcacctgatggcctggctgtggttggtgtttttttggagacaggagacgagcaccccagcatgaatcgtctgacagatgcgctctacatggtccggttcaagggcaccaaagcccagttcagctgcttcaaccccaagtgcctcctgcctgccagccggcactactggacctacccgggctctctgacgactcccccactcagtgagagtgtcacctggattgtgctccgggagcccatctgcatctctgaaaggcagatggggaagttccggagcctgctttttacctcggaggacgatgagaggatccacatggtgaacaacttccggccaccacagccactgaagggccgcgtggtaaaggcctccttccgggcctgagctgcccatctgcctagccggccactagggcaccatcttctcaagggcttccatgtcagcagacaccaaaccatctgaggcttcctccctggggggtgctggggaccctccttcagccagtttgctccttggtcaccctggaggcttctggatgggacccttgagtctggcggcagcccttccagctgccctggggacaggaaggagcaggagctaagcagggtccaagcctggggctgcctctgctctccaagacccaaagaccctgggaacctcctctggtcttcccactggcagtgcagcagccccaccccgagcgcacactgtgatggaggagactgagctccctggggcgggcagctgacactaccagagagactcaagcaataattagaggtgggcagagctgccctctcggcattacctcttctgcaggctctgccatgcacgcacctcactgccaggccattaaaatcagcacccagcatgctggaggtgacgtggccttctcctccagcactgtgccaggcaccctggctatagcttatacagtatctccccttgtccccacccagtcaccaaagccacctacatgacagtccatccctgttgaattaataaattaatgtatcc

SEQ ID NO: 634 - DNA, 308 bp, Artificial Sequence
  Description of Artificial sequences:primer
  misc_feature (1)..(308): 3' terminal sequence from clone image:289857. phenylethanolamine n-methyltransferase(PNMT) gene.
  misc_feature (270)..(270): n is a, c, g, or t
  misc_feature (288)..(288): n is a, c, g, or t
gaccgcagcggcagggtattatttctttattaggtgccacttcaaagaacagggaatccaggtgggtgggggccacagggcaccaggtacagccctcacagcccaaccttctgagcccaggcgaagaagacgcccttgacatcatctacgcctgtctgaaggtgggcaggcatgatataggtgcggaccttgtagccactacgcaccagggcctccctcacctcctcctcagacactggcaccaccgtcaagcctggcctccccagccangtaccacgactcctccanggctcccgatgaaggaggag

SEQ ID NO: 635 - DNA, 1212 bp, Artificial Sequence
  Description of Artificial sequences:primer
  misc_feature (1)..(1212): phenylethanolamine n-methyltransferase(PNMT) gene.
ggacgattgccgctgcagccgccgccccactcacctccggtgtgtctgcagcccggacactaagggagatggatgaatgggtggggaggatgcggcgcacatggccccgggcggctcggcggtcagctgccgcccccacagcggaccggtcggggcgggggtcgggcggtagaaaaaagggccgcgaggcgagcggggcactgggcggaccgcggcggcagcatgagcggcgcagaccgtagccccaatgcgggcgcagcccctgactcggccccgggccaggcggcggtggcttcggcctaccagcgcttcgagccgcgcgcctacctccgcaacaactacgcgccccctcgcggggacctgtgcaacccgaacggcgtcgggccgtggaagctgcgctgcttggcgcagaccttcgccaccggtgaagtgtccggacgcaccctcatcgacattggttcaggccccaccgtgtaccagctgctcagtgcctgcagccactttgaggacatcaccatgacagatttcctggaggtcaaccgccaggagctggggcgctggctgcaggaggagccgggggccttcaactggagcatgtacagccaacatgcctgcctcattgagggcaagggggaatgctggcaggataaggagcgccagctgcgagccagggtgaaacgggtcctgcccatcgacgtgcaccagccccagcccctgggtgctgggagcccagctcccctgcctgctgacgccctggtctctgccttctgcttggaggctgtgagcccagatcttgccagctttcagcgggccctggaccacatcaccacgctgctgaggcctggggggcacctcctcctcatcggggccctggaggagtcgtggtacctggctggggaggccaggctgacggtggtgccagtgtctgaggaggaggtgagggaggccctggtgcgtagtggctacaaggtccgggacctccgcacctatatcatgcctgcccaccttcagacaggcgtagatgatgtcaagggcgtcttcttcgcctgggctcagaaggttgggctgtgagggctgtacctggtgccctgtggcccccacccacctggattccctgttctttgaagtggcacctaataaagaaataataccctgccaaaaaaaaaaaaaaaaaaaaaaaaaaaaaaaaaaaaaaaaaaaaaaaaaaaaaaa

SEQ ID NO: 636 - DNA, 470 bp, Artificial Sequence
  Description of Artificial sequences:primer
  misc_feature (1)..(470): 3' terminal sequence from clone image:291448. silver homolog (mouse)(SILV) gene.
caggctctgagtatttatttcagttaatagtagtctcccagggaagactgggggaaatataggtgtttctgtcaactccaggaaaatcacagcatcatatgagagtactcagacctgctgcccactgaggagggggctattctcaccaatgggacaagagcagaagatgcggggtagacgcagccagtgactgctgctatgtggcaactggggtacggagaagtcttgcttcataagtctgcgcctatatatcagagatgcaaggaccacagccatcaacaccagcaagatgcccacgatcagcggaacctgcccaaggcctgcttcttgaccaggcatgataagctgggtgctgaccactgccaggctgttggtatcagccagagacacattgaggcagtatgtccccgagccacccttcagtatctggtgcagaaccagctggcaagctggggctgggtagcacaggc

SEQ ID NO: 637 - DNA, 467 bp, Artificial Sequence
  Description of Artificial sequences:primer
  misc_feature (1)..(467): 5' terminal sequence from clone image:291448. silver homolog (mouse)(SILV) gene.
  misc_feature (422)..(422): n is a, c, g, or t
  misc_feature (439)..(439): n is a, c, g, or t
cacctggtcaggcgccaactgcagagccctctggaaccacatctgtgcaggtgccaaccactgaagtcataagcactgcacctgtgcagatgccaactgcagagagcacaggtatgacacctgagaaggtgccagtttcagaggtcatgggtaccacactggcagagatgtcaactccagaggctacaggtatgacacctgcagaggtatcaattgtggtgctttctggaaccacagctgcacaggtaacaactacagagtgggtggagaccacagctagagagctacctatccctgagcctgaaggtccagatgccagctcaatcatgtctacggaaagtatacaggttccctgggccccctgctggatggtcaccaccttaaggctggtgaagagcaagtcccctggattgtgtctgtangatatggtcctttccgnacctgacatgccagtattgaagtccgag

SEQ ID NO: 638 - DNA, 1986 bp, Artificial Sequence
  Description of Artificial sequences:primer
  misc_feature (1)..(1986): silver homolog (mouse)(SILV) gene.
atggatctggtgctaaaaagatgccttcttcatttggctgtgataggtgctttgctggctgtgggggctacaaaagtacccagaaaccaggactggcttggtgtctcaaggcaactcagaaccaaagcctggaacaggcagctgtatccagagtggacagaagcccagagacttgactgctggagaggtggtcaagtgtccctcaaggtcagtaatgatgggcctacactgattggtgcaaatgcctccttctctattgccttgaacttccctggaagccaaaaggtattgccagatgggcaggttatctgggtcaacaataccatcatcaatgggagccaggtgtggggaggacagccagtgtatccccaggaaactgacgatgcctgcatcttccctgatggtggaccttgcccatctggctcttggtctcagaagagaagctttgtttatgtctggaagacctggggccaatactggcaagttctagggggcccagtgtctgggctgagcattgggacaggcagggcaatgctgggcacacacaccatggaagtgactgtctaccatcgccggggatcccggagctatgtgcctcttgctcattccagctcagccttcaccattactgaccaggtgcctttctccgtgagcgtgtcccagttgcgggccttggatggagggaacaagcacttcctgagaaatcagcctctgacctttgccctccagctccatgaccccagtggctatctggctgaagctgacctctcctacacctgggactttggagacagtagtggaaccctgatctctcgggcacttgtggtcactcatacttacctggagcctggcccagtcactgcccaggtggtcctgcaggctgccattcctctcacctcctgtggctcctccccagttccaggcaccacagatgggcacaggccaactgcagaggcccctaacaccacagctggccaagtgcctactacagaagttgtgggtactacacctggtcaggcgccaactgcagagccctctggaaccacatctgtgcaggtgccaaccactgaagtcataagcactgcacctgtgcagatgccaactgcagagagcacaggtatgacacctgagaaggtgccagtttcagaggtcatgggtaccacactggcagagatgtcaactccagaggctacaggtatgacacctgcagaggtatcaattgtggtgctttctggaaccacagctgcacaggtaacaactacagagtgggtggagaccacagctagagagctacctatccctgagcctgaaggtccagatgccagctcaatcatgtctacggaaagtattacaggttccctgggccccctgctggatggtacagccaccttaaggctggtgaagagacaagtccccctggattgtgttctgtatcgatatggttccttttccgtcaccctggacattgtccagggtattgaaagtgccgagatcctgcaggctgtgccgtccggtgagggggatgcatttgagctgactgtgtcctgccaaggcgggctgcccaaggaagcctgcatggagatctcatcgccagggtgccagccccctgcccagcggctgtgccagcctgtgctacccagcccagcctgccagctggttctgcaccagatactgaagggtggctcggggacatactgcctcaatgtgtctctggctgataccaacagcctggcagtggtcagcacccagcttatcatgcctggtcaagaagcaggccttgggcaggttccgctgatcgtgggcatcttgctggtgttgatggctgtggtccttgcatctctgatatataggcgcagacttatgaagcaagacttctccgtaccccagttgccacatagcagcagtcactggctgcgtctaccccgcatcttctgctcttgtcccattggtgagaatagccccctcctcagtgggcagcaggtctga

SEQ ID NO: 639 - DNA, 418 bp, Artificial Sequence
  Description of Artificial sequences:primer
  misc_feature (1)..(418): 3' terminal sequence from clone image:292321. ankyrin 1, erythrocytic(ANK1) gene.
  misc_feature (341)..(341): n is a, c, g, or t
  misc_feature (347)..(347): n is a, c, g, or t
ccaggaagcccacatggatttctgacagatgaggttgggaaaaagtaccctgtacgaatcaaaacaatttaaaaaaaaaaccccaaaaccaaaacccatccccagccacaaaaagccctcattcacttttgcgttcgcaggctctcctggcttgttttctatccctctctctccccgcttcttgctgcttttgtgtcctggttccgacagatcagctgtcattgcaagaggcaggattgaagcctggaggtcatgcgtctacagtcagtcattcatgccaagaggggactagcaggagtcccttacagaggtcatgccgtcagccccagaggaatgttgtncaccgntgcggtgggcccctcagggtccagctctcctcctggtgtgcatggcagaagtgtgtggggttcaaggggtt

SEQ ID NO: 640 - DNA, 529 bp, Artificial Sequence
  Description of Artificial sequences:primer
  misc_feature (1)..(529): 5' terminal sequence from clone image:292321. ankyrin 1, erythrocytic(ANK1) gene.
  misc_feature (20)..(20): n is a, c, g, or t
  misc_feature (268)..(268): n is a, c, g, or t
  misc_feature (273)..(274): n is a, c, g, or t
  misc_feature (276)..(277): n is a, c, g, or t
  misc_feature (287)..(287): n is a, c, g, or t
  misc_feature (299)..(299): n is a, c, g, or t
  misc_feature (317)..(317): n is a, c, g, or t
  misc_feature (489)..(489): n is a, c, g, or t
ggcggcaacattgtcaccangaagatcattcgcaaggtggttcgacagatagacttgtccagcgccgatgccgcccaggagcacgaggaggtgactgtagaggggcccctggaggatcccagtgagctggaggtcgatattgattactttatgaaacactccaaggatcacacctcgacacccaacccctgaaccccacacactctgccatgcacacaggaggagagctggacctgagggccaccgcagcggtgcacacattcctctngggtnnannggattaaccnttttaagggacncctggcaagtcccttctnggattaattacttgacttgtagacgcatgaccttccaggctttcaaatcctggcttctttgcaaatggacaagcttgattcttgttcgggaacccagggaccacaaaaaagcaagcaaagaaaccgggggaagaagaagagggattagaaaacaagcgcaggagagcctgcnaaacgcaaaagttgaatgagggctttttgtggctggggat

SEQ ID NO: 641 - DNA, 8280 bp, Artificial Sequence
  Description of Artificial sequences:primer
  misc_feature (1)..(8280): ankyrin 1, erythrocytic(ANK1) gene.
agaggctgcggtgagtccgccagccccagctgctcctcctcaagcccccaaggcccttcggcgggcccctgctgaaagaccggcatgccctattctgtgggcttccgcgaagccgatgctgctaccagctttctgagagcagcaagatcaggtaacttggacaaagctttggatcacctgcggaatggggtagatattaacacctgtaaccagaatgggttgaatggcttgcatctggcttctaaggaaggccatgtgaaaatggtggttgaacttctgcacaaagaaatcattctagaaacgacaaccaagaaggggaacacggccctgcacatcgctgctctagccgggcaggatgaggtggtccgggagcttgtcaactatggagccaacgtcaatgcccagtcacagaaaggttttacacccctgtacatggcagcacaagagaaccacttggaagtggttaagtttttactggaaaatggagctaaccagaatgtagccacagaagacggcttcacgcctctggcggtagccctgcagcagggccatgagaacgtcgtcgcgcacctcatcaactacggcaccaaggggaaggtgcgcctcccggccctgcacatcgcggcccgcaacgacgacacgcgcacggctgcggtgctgctgcagaacgaccccaacccggacgtgctttccaagacgggattcacgcccctgcacattgcggctcactacgagaacctcaacgtggcccagttgctcctcaacagaggagccagcgtcaatttcacaccacagaacggcatcacgccactgcacatcgcctcccgcaggggcaacgtgatcatggtgcggctgctgctggatcggggagcccagatagaaaccaagaccaaggacgaattgacacctctccactgtgcagctcgaaatgggcacgtgcgaatctcagagatcctgctggaccacggggcaccaatccaagccaaaaccaagaacggcctgtccccaattcacatggcggctcagggagaccacctcgactgtgtccggctcctgttgcaatacgacgcagagatagacgacatcaccctggaccacctgaccccactccacgtggctgcccactgtggacaccacagggtggctaaggtccttctggataaaggggccaaacccaactccagagccctgaatggctttacccccttacacatcgcctgcaaaaagaaccacgtccgtgtcatggagctgctgctgaagacgggagcctcgatcgacgcggtcaccgagtctggcctgacacctctccacgtggcctccttcatggggcaccttcccatcgtgaagaacctcctgcagcggggggcgtcgcccaacgtctccaacgtgaaagtggagaccccgctacacatggcagccagagccgggcacacggaagtggccaaatatttactccagaacaaagccaaagtcaatgccaaggccaaggatgaccagaccccacttcactgtgcagctcgcatcggccacacaaacatggtgaagctcctgctggaaaataacgccaaccccaacctggccaccaccgccgggcacacccccctgcacattgcagcccgtgagggccatgtggaaacagtcctggcccttctggaaaaggaagcatcccaggcctgcatgaccaagaaaggatttacccctctgcacgtggcggccaagtacgggaaggtgcgggtggcagagctgctgctggagcgggacgcacacccgaatgctgccggaaaaaatggcctgacccccctgcacgtggccgtccatcacaacaacctggacatcgtcaagctgctgcttccccggggcggctccccgcacagccctgcctggaatggctacacccctttgcacatcgctgccaagcagaaccaggtggaggtggcccgtagtctgctgcagtatgggggctcagcaaacgccgagtcggtgcaaggtgtgacgccccttcacctggccgcccaggagggccacgcagagatggtggctctgctgctctcgaaacaagccaatggcaacctggggaacaagagcggactcactcccctccatctggtagcacaagaaggccacgttccagtggcagatgtgctgatcaaacacggtgtcatggtggacgccaccacccggatgggctacactcccctccatgtggccagtcactatggaaacatcaagctggtgaagtttctgctgcagcaccaggcagatgtcaatgccaagaccaagctaggatacagccccctgcaccaggcagcccagcagggacacacagacatcgtgactctgcttctgaaaaacggtgcttccccaaacgaggtcagctcggatggaaccacacctctggccatagccaagcgcttgggctacatttctgtcaccgacgtgctcaaggtcgtcacggatgaaaccagtttcgtgttagtcagtgataagcatcgaatgagtttccctgagacagttgatgagatcctggatgtctcggaagatgaaggggaagaactcatcagcttcaaggctgagaggcgggattccagggatgttgatgaagagaaggagctgctggattttgtgccgaagctagaccaagtggtggaatctccagccatccccaggattccctgtgccatgcctgagacagtggtgatcaggtcagaagagcaggagcaggcatctaaagagtatgatgaggactccctcatccccagcagcccggccaccgagacctcagacaacatcagcccggtggccagcccggtgcatacagggtttctggtgagcttcatggttgacgcccggggtggttccatgagaggaagtcgccacaacggcctgcgagtggtgatcccgccacggacgtgcgcagcgcccacccgcatcacctgccgcctggtcaagccccagaagctcagcacgccgcccccactggccgaggaggagggcctggccagcaggatcatagcactggggcccacgggggcacagttcctgagccctgtaatcgtggagatcccgcactttgcctcccatggccgtggagaccgcgagctcgtggttctgaggagcgaaaacggctccgtgtggaaggagcacaggagccgctatggagagagctacctggatcagatcctcaacgggatggacgaagagctggggagcctggaggagctagagaagaagagggtgtgccgaatcatcaccaccgacttcccgctgtacttcgtgatcatgtcacggctctgccaggactacgacatcatcggtcccgaagggggctccctgaagagcaagctggtgcccctggtacaggcaacgttcccggagaatgccgtcaccaagagagtgaagctggctctgcaggcccagcctgtcccggatgagcttgtcactaagctcctgggcaaccaggccacattcagccccattgtcaccgtggagccccggcgccggaagttccaccgccccattgggcttcggatcccactacctccttcctggaccgacaacccgagggacagtggggagggagacaccaccagcctgcgcctgctttgcagcgtcattggaggaacagaccaagcccagtgggaagacataacaggaaccaccaaacttgtatatgccaacgagtgcgccaacttcaccaccaatgtctctgccaggttttggctgtcggactgtcctcggactgctgaggctgtgaactttgccaccctgctgtacaaagagctcactgcagtgccctacatggccaaattcgtcatctttgccaagatgaatgacccccgagaggggcgcctgcgctgctactgcatgacagatgataaagtggacaagaccctggagcagcatgagaacttcgtggaggtggcccggagcagggacatagaggtgttggaaggaatgtccctgtttgcagaactctctgggaacctggtgcctgtgaagaaagctgcccagcagcggagcttccacttccagtcatttcgggagaaccgtctggccatgcctgtaaaggtgagggacagcagtcgagagccgggagggtccctgtcgtttctgcgcaaggcgatgaagtacgaggacacccagcacattctctgccacctgaacatcaccatgcccccctgcgctaagggaagtggagccgaagataggagaaggaccccgacgcccctggccctgcgatacagcattctcagtgagtccacaccaggttctctcagtgggacagagcaggcagagatgaagatggctgttatctcagagcacctcggtctcagctgggcagagttggcccgggagctgcagttcagtgtggaagacatcaacaggatccgagtggaaaatcccaactccctgttggagcagagtgtggccttgctgaacctctgggtcatccgtgaaggccaaaacgcaaacatggagaatctgtacacagccctgcagagcattgaccgtggcgagatcgtgaacatgctggagggttccggccgacagagccgcaacttgaagccagacaggcggcacaccgaccgcgactactcgctgtcaccctcccagatgaatggttactcctcactgcaggacgagctgctgtcccctgcctccctgggctgtgcactttcctctccgctacgtgcagaccagtactggaatgaggtggccgtcctagacgccatccccttggcggccacggagcatgacaccatgctggagatgtctgacatgcaggtgtggtctgcgggcctcacgccttctctggtcactgctgaggactcctctctggagtgtagcaaggctgaggactctgatgccacaggtcacgagtggaagttggagggggcactctcagaggaaccgcggggccccgagttgggctctctggaacttgtggaggacgacacagtggattcagatgccacaaatggccttatcgatttgcttgaacaggaggaaggtcagaggtcagaagagaagctgccaggttctaagaggcaggatgacgcgacaggtgcagggcaggactcagagaatgaagtgtctcttgtttcaggccatcagagggggcaagcccgaatcacacattcccccaccgtgagtcaggtgacggagaggagtcaggacagactgcaggactgggatgcagacggctcgattgtctcatacctgcaagatgctgcacaaggttcctggcaagaggaggtcacgcaaggtccacactcattccagggaacaagtaccatgactgaagggctagagcccggtggatctcaggagtacgagaaggtcctggtgtctgtaagtgagcacacgtggacagaacagcccgaggctgagagctcccaggccgacagggaccggaggcagcaaggccaagaagagcaggtgcaggaggccaagaacaccttcacccaagtggtgcaggggaatgagtttcagaatattccaggggagcaggtgacagaggagcaattcacggatgagcagggcaacattgtcaccaagaagatcattcgcaaggtggttcgacagatagacttgtccagcgccgatgccgcccaggagcacgaggaggtggagctgagagggagtggcctacagccggacctgatagagggcaggaagggggcgcagatagtgaagcgggccagcctgaaaagggggaaacagtgaccccgagccgctctccttggagtagcctctcgggaggatcacacctcgacacccaacccctgaaccccacacactctgccatgcacacaggaggagagctggacctgagggccaccgcagcggtgcacacattcctctgggctgacggcatgacctctgtaagggactcctgctagtcccctcttggcatgaatgactgactgtagacgcatgacctccaggcttcaatcctgcctcttgcaatgacagctgatctgtcggaaccaggacacaaaagcagcaagaagcggggagagagagggatagaaaacaagcgcaggagagcctgcgaacgcaaaagtgaatgagggctttttgtggctggggatgggttttggttttggggttttttttttaaattgttttgacttcgtacagggtactttttcccaacctcatctgtcagaaatccatgtgggcttcctggaaagaaaaaaaaaaaaaagaaaactaggcatgaaatcagtttaacaccttaatcttaagccatgtcctcatctgcccaccctccccaacccacatacctccattccacttgtgacaccccctcgactccctggtgacgctcctcccagatcgctctacatgacattcaggacacacacacacacacacacacacacaccactcgcctccactgaatctacacacagattttactgtgacttctgaagctgtggataaattggaattttttatgttgtctctctctctgccaatttcaatacgaatcatcttccaatggaaaatcattaccttgaagagtgcattcggggttccttgtgttagggacttaagaatctgaggcgcgaggacccccaggcttacctgtaggactcaaagggagccaggaccccatctgaaagggtctcctctctcagttgggggacaggccggtggctgacccaggattgcaccagcatgtccatagagaagaggttttctatgtcttcaagcactatatcatagtccgtgttcaaagtgtaaactgtacagtaatcagccttgtgtatatgaaaaacaataaatactatgcaaaccaatagaaacatttagcagtacgtacagagcctgacagcgcagctcctgaggacttctgcggctgcaggagaaggagctgtggcctgtctttcagtgaaagaggaaggaaaggagtagggctagtgaatgtatctgccaggtcttagaagtcaggaccacccagggtctcccagagtgaacttggtgctctaagtccaggcagcctgcaggctggggaccctgggtgcaggtgccaggctcgaggctgttccctgtcctgcctcagtgcctcccctctgcccagcccctgtggcctcttggagaggcgagccagggggctccccggaccgcatggccggtgagagtagagtcggaggcggagagcctggacgcccagaggccggggccaggctctgggtcaaggcaggaaggagacagacagctggcagttcctcgcctcggtgccatcagggaggagccttaagttccactagagcctccggcccagggaggccagaatcagcacaatcccggccccgccctcgcggcgggcgcccccagggccaggagagagagacagggctggctcctctcgcccctggagccgcggtgtggacggcccggccccgtccgccccgccgctctgcgggagtgtccttcgggacacacttaaaccttccaagtagcacagaagccccctccacgtcagagccccctggccgcggggcctgtgagcggagaggggccctgcttcccacacaaatccgccccggtgcacccccggccaggcaggccccggggcggcctaggcgccttgtcggccgggggtggggctgcttttgcttcctttagaggggcgggcagggagaggaagctctagctccgggcctgagtttccccgaggctgcgtcggaggagctgcagggcgagcccggacggctgccgtctccgccagaggccaccccggcccggcctccaggcagaggcgcccccctccatcctcccccatcccgggggccacggcaggggggccgcacagcgcggctgggaccgattcggtgacggcccaaggaagctgggcgcagggctcgcctctcccgcctcgatcctgcaccttcctctcccaggtcgctgctgcagccaacccagtagcccccttagcgcccccgcggaccccgcagctccagactccgctttggcacctctgctccggctggcatggctgcacgctccggctgctagtaggagccgttaggggaggagtttggggtctccacacgatgcctagagaatgctgcagtctgcacattagacgctttttagaagttttgaaattaccttgatttttttaattgttatgaaaatggatcttttcttgactctcccacatgctctgttatgggagagaatcccctaccctactctgatgtatagaccattctcccttcaccagccgaaccaatgtcaaaattaataaagaaatggactaaggca

SEQ ID NO: 642 - DNA, 396 bp, Artificial Sequence
  Description of Artificial sequences:primer
  misc_feature (1)..(396): 3' terminal sequence from clone image:29451. x-ray repair complementing defective repair in chinese hamster cells 1(XRCC1) gene.
  misc_feature (104)..(104): n is a, c, g, or t
  misc_feature (164)..(164): n is a, c, g, or t
  misc_feature (184)..(184): n is a, c, g, or t
  misc_feature (198)..(198): n is a, c, g, or t
  misc_feature (226)..(226): n is a, c, g, or t
  misc_feature (326)..(326): n is a, c, g, or t
tttttttttttttttgagaaccaactcatctttattaaatgcatcgtgtgtgtgtgtgtgtgtgtgtgtgtgtgtgtgtgtgtatagcacatacttcaggcttncggcaccaccccatagagctggtgaggaagtaacttctgcttctcattgcaactgtaganccatcggggacgaacgaatnccagggaggggttntccatcagggcctcctcaaagctgggancccattcctgtgctgtgatcacaaactgaacccggtcactcatatagtcctcgaggctccccattgaagggctgtgacgtatcggatgagtttccgccgntcgtccccggggaactccccgtaaaggaaagaagtgtttgcccggggaaggaaatctggggagctcaggg

SEQ ID NO: 643 - DNA, 331 bp, Artificial Sequence
  Description of Artificial sequences:primer
  misc_feature (1)..(331): 5' terminal sequence from clone image:29451. x-ray repair complementing defective repair in chinese hamster cells 1(XRCC1) gene.
  misc_feature (98)..(98): n is a, c, g, or t
  misc_feature (154)..(154): n is a, c, g, or t
  misc_feature (169)..(169): n is a, c, g, or t
  misc_feature (172)..(172): n is a, c, g, or t
tgaggcagaggccccgtcccagaaggtgacagtgaccaagcttggccagttccgtgtgaaggaggaggatgagagcgccaactctctgaggccggggntctcttcttcagccggatcaacaagacatccccagtcacagccagcgacccggcangacctagctatgcanctnctaccctccaggcttctagtgctgcctcctcagcctctccagtctccaggggccataggcaggcacctccaagccccagggagtctcccaaagggaaggaggaagttggatttgaaccaagaagaaaagaagacccccagcaaaccaccagcccagctg

SEQ ID NO: 644 - DNA, 2083 bp, Artificial Sequence
  Description of Artificial sequences:primer
  misc_feature (1)..(2083): x-ray repair complementing defective repair in chinese hamster cells 1(XRCC1) gene.
actttagccagcgcagggcgcaccccgctccctcccactctccctgcccctcggaccccatactctacctcatccttctggccaggcgaagcccacgacgttgacatgccggagatccgcctccgccatgtcgtgtcctgcagcagccaggactcgactcactgtgcagaaaatcttctcaaggcagacacttaccgaaaatggcgggcagccaaggcaggcgagaagaccatctctgtggtcctacagttggagaaggaggagcagatacacagtgtggacattgggaatgatggctcagctttcgtggaggtgctggtgggcagttcagctggaggcgctggggagcaagactatgaggtccttctggtcacctcatctttcatgtccccttccgagagccgcagtggctcaaaccccaaccgcgttcgcatgtttgggcctgacaagctggtccgggcagccgccgagaagcgctgggaccgggtcaaaattgtttgcagccagccctacagcaaggactccccctttggcttgagttttgtacggtttcatagccccccagacaaagatgaggcagaggccccgtcccagaaggtgacagtgaccaagcttggccagttccgtgtgaaggaggaggatgagagcgccaactctctgaggccgggggctctcttcttcagccggatcaacaagacatccccagtcacagccagcgacccggcaggacctagctatgcagctgctaccctccaggcttctagtgctgcctcctcagcctctccagtctccagggccataggcagcacctccaagccccaggagtctcccaaagggaagaggaagttggatttgaaccaagaagaaaagaagacccccagcaaaccaccagcccagctgtcgccatctgttcccaagagacctaaattgccagctccaactcgtaccccagccacagccccagtccctgcccgagcacagggggcagtgacaggcaaaccccgaggagaaggcaccgagcccagacgaccccgagctggcccagaggagctggggaagatccttcagggtgtggtagtggtgctgagtggcttccagaaccccttccgctccgagctgcgagataaggccctagagcttggggccaagtatcggccagactggacccgggacagcacgcacctcatctgtgcctttgccaacacccccaagtacagccaggtcctaggcctgggaggccgcatcgtgcgtaaggagtgggtgctggactgtcaccgcatgcgtcggcggctgccctcccggaggtacctcatggcagggccaggttccagcagtgaggaggatgaggcctctcacagcggtggcagcggagatgaagcccccaagcttcctcagaagcaaccccagaccaaaaccaagcccactcaggcagctggacccagctcaccccagaagcccccaacccctgaagagaccaaagcagcctcaccagtgctccaggaagatatagacattgagggggtacagtcagaaggacaggacaatggggcggaagattctggggacacagaggatgagctgaggagggtggcagagcagaaggaacacagactgccccctggccaggaggagaatggggaagacccgtatgcaggctccacggatgagaacacggacagtgaggaacaccaggagcctcctgatctgccagtccctgagctcccagatttcttccagggcaagcacttctttctttacggggagttccctggggacgagcggcggaaactcatccgatacgtcacagccttcaatggggagctcgaggactatatgagtgaccgggttcagtttgtgatcacagcacaggaatgggatcccagctttgaggaggccctgatggacaacccctccctggcattcgttcgtccccgatggatctacagttgcaatgagaagcagaagttacttcctcaccagctctatggggtggtgccgcaagcctgaagtatgtgctatacacacacacacacacacacacacacacacacacgatgcatttaataaagatgagttggttctc

SEQ ID NO: 645 - DNA, 376 bp, Artificial Sequence
  Description of Artificial sequences:primer
  misc_feature (1)..(376): 3' terminal sequence from clone image:29933. cse1 chromosome segregation 1-like (yeast)(CSE1L) gene.
  misc_feature (115)..(115): n is a, c, g, or t
  misc_feature (120)..(120): n is a, c, g, or t
  misc_feature (144)..(144): n is a, c, g, or t
  misc_feature (227)..(227): n is a, c, g, or t
  misc_feature (281)..(281): n is a, c, g, or t
  misc_feature (288)..(288): n is a, c, g, or t
  misc_feature (300)..(300): n is a, c, g, or t
tttttttttgtcaggttaaagcaacatttaatatcctttacaagatggaattcgtgacaagttcaaaaggaaaacttcctttgttttaatgcagctgtgctcagaagcctgtganttccnaggaaaccatctgggtttagcccnttagaaaaatgcagtttaaagcagtgtcacactgggctgcctgaaggtacccttgggagtatactgggagcgcttctgcattncagggctggtgcttcaccattgatgggaacccttcctgggacaggcggttaganacacttntgcaagtgactntgtccagggtgaattttggggttatttcaccatttggacctacagggatcatggctcttttttcccagcaaatggt

SEQ ID NO: 646 - DNA, 333 bp, Artificial Sequence
  Description of Artificial sequences:primer
  misc_feature (1)..(333): 5' terminal sequence from clone image:29933. cse1 chromosome segregation 1-like (yeast)(CSE1L) gene.
  misc_feature (90)..(90): n is a, c, g, or t
  misc_feature (99)..(99): n is a, c, g, or t
  misc_feature (149)..(149): n is a, c, g, or t
  misc_feature (227)..(227): n is a, c, g, or t
  misc_feature (251)..(251): n is a, c, g, or t
  misc_feature (279)..(279): n is a, c, g, or t
  misc_feature (285)..(285): n is a, c, g, or t
  misc_feature (292)..(292): n is a, c, g, or t
  misc_feature (318)..(318): n is a, c, g, or t
gaagctgattgcatccaaagcaaatgaccaccaaggtttttatcttctaaacagtataatagagcacatgcctcctgaatcagttgaccnatatagganacaaatcttcattctgctattccagagacttcagaattccaaaacaaccnagtttatcaagagttttttagtctttattaatttgtattgcataaaatatgggggcactaggcactacaagaaatatntgatggggtatacaacccaaaacngtttagggatgggttttgggggaaaaanttattnatttccnggaaattcaggagggtttctggggantgtaggggggaaaag

SEQ ID NO: 647 - DNA, 3579 bp, Artificial Sequence
  Description of Artificial sequences:primer
  misc_feature (1)..(3579): cse1 chromosome segregation 1-like (yeast)(CSE1L) gene.
tcaggctcgctgtcgcgccattttgccggggtttgaatgtgaggcggagcggcggcaggagcgggtagtgccagctacggtccgcggctggggttccctcctccgtttctgtatccccacgagatcctatagcaatggaactcagcgatgcaaatctgcaaacactaacagaatatttaaagaaaacacttgatcctgatcctgccatccgacgtccagctgagaaatttcttgaatctgttgaaggaaatcagaattatccactgttgcttttgacattactggagaagtcccaggataatgttatcaaagtatgtgcttcagtaacattcaaaaactatattaaaaggaactggagaattgttgaagatgaaccaaacaaaatttgtgaagccgatcgagtggccattaaagccaacatagtgcacttgatgcttagcagcccagagcaaattcagaagcagttaagtgatgcaattagcattattggcagagaagattttccacagaaatggcctgacttgctgacagaaatggtgaatcgctttcagagtggagatttccatgttattaatggagtcctccgtacagcacattcattatttaaaagataccgtcatgaatttaagtcaaacgagttatggactgaaattaagcttgttctggatgcctttgctttgcctttgactaatctttttaaggccactattgaactctgcagtacccatgcaaatgatgcctctgccctgaggattctgttttcttccctgatcctgatctcaaaattgttctatagtttaaactttcaggatctccctgaattttttgaagataatatggaaacttggatgaataattttcatactctcttaacattggataataagcttttacaaactgatgatgaagaggaagccggcttattggagctcttaaaatcccagatttgtgataatgccgcactctatgcacaaaagtacgatgaagaattccagcgatacctgcctcgttttgttacagccatctggaatttactagttacaacgggtcaagaggttaaatatgatttgttggtaagtaatgcaattcaatttctggcttcagtttgtgagagacctcattataagaatctatttgaggaccagaacacgctgacaagtatctgtgaaaaggttattgtgcctaacatggaatttagagctgctgatgaagaagcatttgaagataattctgaggagtacataaggagagatttggaaggatctgatattgatactagacgcagggctgcttgtgatctggtacgaggattatgcaagttttttgagggacctgtgacaggaatcttctctggttatgttaattccatgctgcaggaatacgcaaaaaatccatctgtcaactggaaacacaaagatgcagccatctacctagtgacatctttggcatcaaaagcccaaacacagaagcatggaattacacaagcaaatgaacttgtaaacctaactgagttctttgtgaatcacatcctccctgatttaaaatcagctaatgtgaatgaatttcctgtccttaaagctgacggtatcaaatatattatgatttttagaaatcaagtgccaaaagaacatcttttagtctcgattcctctcttgattaatcatcttcaagctgaaagtattgttgttcatacttacgcagctcatgctcttgaacggctctttactatgcgagggcctaacaatgccactctctttacagctgcagaaatcgcaccgtttgttgagattctgctaacaaaccttttcaaagctctcacacttcctggctcttcagaaaatgaatatattatgaaagctatcatgagaagtttttctctcctacaagaagccataatcccctacatccctactctcatcactcagcttacacagaagctattagctgttagtaagaacccaagcaaacctcactttaatcactacatgtttgaagcaatatgtttatccataagaataacttgcaaagctaaccctgctgctgttgtaaattttgaggaggctttgtttttggtgtttactgaaatcttacaaaatgatgtgcaagaatttattccatacgtctttcaagtgatgtctttgcttctggaaacacacaaaaatgacatcccgtcttcctatatggccttatttcctcatctccttcagccagtgctttgggaaagaacaggaaatattcctgctctagtgaggcttcttcaagcattcttagaacgcggttcaaacacaatagcaagtgctgcagctgacaaaattcctgggttactaggtgtctttcagaagctgattgcatccaaagcaaatgaccaccaaggtttttatcttctaaacagtataatagagcacatgcctcctgaatcagttgaccaatataggaaacaaatcttcattctgctattccagagacttcagaattccaaaacaaccaagtttatcaagagttttttagtctttattaatttgtattgcataaaatatggggcactagcactacaagaaatatttgatggtatacaaccaaaaatgtttggaatggttttggaaaaaattattattcctgaaattcagaaggtatctggaaatgtagagaaaaagatctgtgcggttggcataaccaaattactaacagaatgtcccccaatgatggacactgagtataccaaactgtggactccattattacagtctttgattggtctttttgagttacccgaagatgataccattcctgatgaggaacattttattgacatagaagatacaccaggatatcagactgccttctcacagttggcatttgctgggaaaaaagagcatgatcctgtaggtcaaatggtgaataaccccaaaattcacctggcacagtcacttcacaagttgtctaccgcctgtccaggaagggttccatcaatggtgagcaccagcctgaatgcagaagcgctccagtatctccaagggtaccttcaggcagccagtgtgacactgctttaaactgcatttttctaatgggctaaacccagatggtttcctaggaaatcacaggcttctgagcacagctgcattaaaacaaaggaagttctccttttgaacttgtcacgaattccatcttgtaaaggatattaaatgttgctttaacctgaaccttgagcaaattagttggtttgtgtgatcatacagttatgtgggtggcttctagtttgcaacttcaagggacaagtattaatagttcagtgtatggcgttggtttgtgttgagcgtttgcacggtttggataatcttaaattttgacggacactgtggagactttctgttactaaatccttttgttttgaagctgttgctatttgtatttctcttgtcctttatattttttgtctgtttatttacgcttttattggaaatgtgaataagtaaagaattacttgtgttacttgccaagcagtgcacatttcatagtttcaaatctgtaatcagcaataaaaatcctaaaatatgtacctaaaaaaaaaaaaaaaaaaaa

SEQ ID NO: 648 - DNA, 448 bp, Artificial Sequence
  Description of Artificial sequences:primer
  misc_feature (1)..(448): 3' terminal sequence from clone image:300163. gs2 gene(DXS1283E) gene.
  misc_feature (271)..(271): n is a, c, g, or t
gcattataaacttttatgcattttattcaaaccaattttctttaagtaaaaacttaacagtgtcatcaaaaccacactgatacaaagattccattttcctcttgcttgggggaaaaagggcttggttgagtctcaccaggtttgccagggacaacatcgatatcctgcttggcgatattaacatacagatctagctgccctttgtcctgcggggagatgtccagtcgtccactgaagggggagatggttactgtccggccgacgggaggantgggaagagcgttggtgaggcctccgtccacccacttctgcccttttgtattccactaagcttcagtcctgcataaatgggcacaaaactgctggctaggaggaccttaatgaggtcctcccctggaggaaaaagtggagactaagtgattttctctgttttggcgttggtgatggg

SEQ ID NO: 649 - DNA, 232 bp, Artificial Sequence
  Description of Artificial sequences:primer
  misc_feature (1)..(232): 5' terminal sequence from clone image:300163. gs2 gene(DXS1283E) gene.
  misc_feature (116)..(116): n is a, c, g, or t
  misc_feature (148)..(148): n is a, c, g, or t
  misc_feature (162)..(162): n is a, c, g, or t
  misc_feature (227)..(227): n is a, c, g, or t
gaagcacatcaacctatcatttgcagcgtgtggatttctgggcatttaccacttgggggcagcatctgcactttgcagacatggcaaaaaacttgtgaaggatgtcaaagccttcnctggggcgtctgcgggatcgttggttgcttcngttctgctaacaanaccagaaaaaatagagggatgtaaccaattttcctacaagttttcccgaagaaatcagaaggcantcttt

SEQ ID NO: 650 - DNA, 232 bp, Artificial Sequence
  Description of Artificial sequences:primer
  misc_feature (1)..(232): 3' terminal sequence from clone image:30066. taf10 rna polymerase ii, tata box binding protein (tbp)-associated factor, 30kda(TAF10) gene.
  misc_feature (106)..(106): n is a, c, g, or t
  misc_feature (130)..(130): n is a, c, g, or t
tttttttcataataaactttattgtgacaggcggggctgatccctcccatgttgggaggacaccatgtggcaagtgacaaagctctgagcccgcccctcttgggcnacagtggtagggatgggggaaggngatggaccccatggctggggtagtaccatgactggaggcgggggaggcaaccagaggcctgctgctttggggaggtgcattcccccaaccatgtcccgacac

SEQ ID NO: 651 - DNA, 762 bp, Artificial Sequence
  Description of Artificial sequences:primer
  misc_feature (1)..(762): taf10 rna polymerase ii, tata box binding protein (tbp)-associated factor, 30kda(TAF10) gene.
gttcgccgcctctcccaccggcccgatgagctgcagcggctccggcgcggaccccgaggcggcgccggcctccgccgcctcggccccgggccccgcgcccccggtctcggctcccgccgcgctgccctccagcaccgccgcggagaacaaggccagccccgcggggacagcggggggacctggggctggagcagctgctgggggcacgggacccttggcggcgcgggccggggagccagctgagcggcgtggggcggctccggtgtcggcgggtggcgcggcgcccccggagggggccatatctaacggggtttacgtactgccgagcgcggccaacggagacgtgaagcccgtggtgtccagcacgcctttggtggacttcttgatgcagctggaagattacacgcctacgatcccagatgcagtgactggttactacctgaaccgtgctggctttgaggcctcagacccacgcataattcggctcatctccttagctgcccagaaattcatctcagatattgccaatgatgccctacagcactgcaaaatgaagggcacggcctccggcagctcccggagcaagagcaaggaccgcaagtacactctaaccatggaggacttgacccctgccctcagcgagtatggcatcaatgtgaagaagccgcactacttcacctgagccacccaacctaaatgtacttatctgtccccatgtccccacaccagcctgttttcataataaactttattgtgacaggc

SEQ ID NO: 652 - DNA, 349 bp, Artificial Sequence
  Description of Artificial sequences:primer
  misc_feature (1)..(349): 3' terminal sequence from clone image:301119. creatine kinase, mitochondrial 2 (sarcomeric)(CKMT2) gene.
  misc_feature (157)..(157): n is a, c, g, or t
atattaaggagagttttattgtaaagataggcaggatctacaattttatatttttccaagtgtataaaaactctcagagtagagatttatgtctgttgtaccagcagacagattatttataaattgggaaagggaaagtttactttttgccaaactngaggcagagggggtggcaccttaatatcttggcctctctccaacttcttttcacaatccaccaggtaattgactccatcgatgactatctgaacaagctcaacctctgatcgaccaattctatctatgttggaaatgtcgtacacatctgcgacccgcggcaatgtcccacaccaccttgtggccacgcttc

SEQ ID NO: 653 - DNA, 474 bp, Artificial Sequence
  Description of Artificial sequences:primer
  misc_feature (1)..(474): 5' terminal sequence from clone image:301119. creatine kinase, mitochondrial 2 (sarcomeric)(CKMT2) gene.
  misc_feature (33)..(33): n is a, c, g, or t
  misc_feature (256)..(256): n is a, c, g, or t
  misc_feature (337)..(337): n is a, c, g, or t
  misc_feature (424)..(424): n is a, c, g, or t
  misc_feature (430)..(430): n is a, c, g, or t
  misc_feature (444)..(444): n is a, c, g, or t
  misc_feature (470)..(470): n is a, c, g, or t
aattcggaacgaggcttggctgtgtgcgctcanaggacgtgggaggctccggcttcaagacactcatccaagaggaaggatggccagtatcttttctaagttgctaactggccgcaatgcttctctgctgtttgctaccatgggcaccagtgtcctgaccaccgggtacctgctgaaccggcagaaagtgtgtgccgaggtccgggagcagcctaggctatttcctccaagcgcagactacccagacctgcgcaanacaaacaactgcatggccgagtgcctcacccccgccatttatgccaagcttcgcaacaaggtgacacccaacggctacacnctggaccagttcatcccagactggaagttggacaacccttggccacccctttcataaaagacttgttggggcatggttggctgggtngacganggagtcctaatganggtgttttgcttgacctttttttgancccg

SEQ ID NO: 654 - DNA, 1597 bp, Artificial Sequence
  Description of Artificial sequences:primer
  misc_feature (1)..(1597): creatine kinase, mitochondrial 2 (sarcomeric)(CKMT2) gene.
ggctccggcttcaagatcaaaggaaatgtttccctttgtcccgtttcacactaaacgggttggggaggaaccaggggagatgtcaaccgtctgccggtgactgggaagttttctgcaagtcctccacagcatagccagcaggccacttttcactaacagaagtcacaagccaagtgagacactcatccaagaggaaggatggccagtatcttttctaagttgctaactggccgcaatgcttctctgctgtttgctaccatgggcaccagtgtcctgaccaccgggtacctgctgaaccggcagaaagtgtgtgccgaggtccgggagcagcctaggctatttcctccaagcgcagactacccagacctgcgcaagcacaacaactgcatggccgagtgcctcacccccgccatttattccaagcttcgcaacaaggtgacacccaacggctacacgctggaccagtgcatccagactggagtggacaaccctggccaccccttcataaagactgtgggcatggtggctggtgacgaggagtcctatgaggtgtttgctgacctttttgaccccgtcatcaaactaagacacaacggctatgaccccagggtgatgaagcacacaacggatctggatgcatcaaagatcacccaagggcagttcgacgagcattacgtgctgtcttctcgggtgcgcactggccgcagcatccgtgggctgagcctgcctccagcctgcacccgggccgagcgaagggaggtagagaacgtggccatcactgccctggagggcctcaagggggacctggctggccgctactacaagctgtccgagatgacggagcaggaccagcagcggctcatcgatgaccactttctgtttgataagccagtgtcccctttattaacatgtgctgggatggcccgtgactggccagatgccaggggaatctggcataattatgataagacatttctcatctggataaatgaggaggatcacaccagggtaatctcaatggaaaaaggaggcaatatgaaacgagtatttgagcgattctgtcgtggactaaaagaagtagaacggttaatccaagaacgaggctgggagttcatgtggaatgagcgcctaggatacattttgacctgtccttcgaaccttggaacaggactacgagctggtgtccacgttaggatcccaaagctcagcaaggacccacgcttttctaagatcctggaaaacctaagactccagaagcgtggcacaggtggtgtggacactgccgcggtcgcagatgtgtacgacatttccaacatagatagaattggtcgatcagaggttgagcttgttcagatagtcatcgatggagtcaattacctggtggattgtgaaaagaagttggagagaggccaagatattaaggtgccaccccctctgcctcagtttggcaaaaagtaaactttccctttcccaatttataaataatctgtctgctggtacaacagacataaatctctactctgagagtttttatacacttggaaaaatataaaattgtagatcctgcctatctttacaataaaactctccttaatat

SEQ ID NO: 655 - DNA, 372 bp, Artificial Sequence
  Description of Artificial sequences:primer
  misc_feature (1)..(372): 3' terminal sequence from clone image:301128. troponin c, slow(TNNC1) gene.
  misc_feature (301)..(301): n is a, c, g, or t
  misc_feature (314)..(314): n is a, c, g, or t
tttgggagagcaggctttatttgcatcccccaggacagatctggggagggagtcgggggatttggggttgaggacatggccaggctcaggtcctgggacccgaccccctccccaaccccaggactcagctggagttggaggctcgggcataggcagctctgggtgaaggtcagcatctactccacacccttcatgaactccaggaactcatcatagtcgatgcggccgtcgttgttcttgtctccgtccttcatgagctcctcgatgtcgtcctccgtgatggtctcggcctgtagcctgnaggcattatcttnaggtcatccaggtcgatgtagccatcagaatttttgtcaaaaaatgcgggaagaggta

SEQ ID NO: 656 - DNA, 686 bp, Artificial Sequence
  Description of Artificial sequences:primer
  misc_feature (1)..(686): troponin c, slow(TNNC1) gene.
cagcaagctgtcctgtgagccgccagcatggatgacatctacaaggctgcggtagagcagctgacagaagagcagaaaaatgagttcaaggcagccttcgacatcttcgtgctgggcgctgaggatggctgcatcagcaccaaggagctgggcaaggtgatgaggatgctgggccagaaccccacccctgaggagctgcaggagatgatcgatgaggtggacgaggacggcagcggcacggtggactttgatgagttcctggtcatgatggttcggtgcatgaaggacgacagcaaagggaaatctgaggaggagctgtctgacctcttccgcatgtttgacaaaaatgctgatggctacatcgacctggatgagctgaagataatgctgcaggctacaggcgagaccatcacggaggacgacatcgaggagctcatgaaggacggagacaagaacaacgacggccgcatcgactatgatgagttcctggagttcatgaagggtgtggagtagatgctgaccttcacccagagctgcctatgcccagcctccaactccagctgagtcctggggttggggagggggtcggggtcccaggacctgagcctggccatgtcctcaaccccaaatcccccgactccctccccagatctgtcctgggggatgcaaataaagcctgctctccc

SEQ ID NO: 657 - DNA, 429 bp, Artificial Sequence
  Description of Artificial sequences:primer
  misc_feature (1)..(429): 3' terminal sequence from clone image:301258. hypothetical protein dkfzp434j0617(DKFZP434J0617) gene.
  misc_feature (346)..(346): n is a, c, g, or t
  misc_feature (366)..(366): n is a, c, g, or t
  misc_feature (372)..(372): n is a, c, g, or t
  misc_feature (386)..(386): n is a, c, g, or t
  misc_feature (413)..(413): n is a, c, g, or t
  misc_feature (424)..(424): n is a, c, g, or t
cttcaatattttatttatatagaaatacttaaaaaatgaagtagcaccattacttaagttttacctttattatgtagaactttaaatgtcagaaaaataaaactcttgatacaatttcaaatcttgtctcagcaaatataatattagtatttgaccatgaggttaaaggccctttatcataaaataaaatatactttgttttttaaactttgctcagtaaagtacatttaagctcaagtaacatcacctacatatacataaacaagtggtaaacaaatgtattaaaatagaaatactaaaactagagtggtgcaacagaatttttggtaacttgcactggaattcnaatttataccaaatggttangaaagncatccaccagttcntttttggacatggtttaataccatttnccggttttggnaataa

SEQ ID NO: 658 - DNA, 171 bp, Artificial Sequence
  Description of Artificial sequences:primer
  misc_feature (1)..(171): 3' terminal sequence from clone image:302310. homo sapiens cdna flj36340 fis, clone thymu2006468..
tttcctgtcattcatttatttgacaaatgtgctcatcagggcatcccccaccctggtaccccatagtagctgcacacagcaggaaccccagaaaagaccttgccccttctgtccctgcagatgacgtccgcggctcccacggccggcagtctgcgtccggacgagctctac

SEQ ID NO: 659 - DNA, 446 bp, Artificial Sequence
  Description of Artificial sequences:primer
  misc_feature (1)..(446): 5' terminal sequence from clone image:302310. homo sapiens cdna flj36340 fis, clone thymu2006468..
  misc_feature (32)..(32): n is a, c, g, or t
  misc_feature (339)..(339): n is a, c, g, or t
  misc_feature (433)..(433): n is a, c, g, or t
tggctaatgcctgctcatttctcatagcgcanccatttactgccttctccaggaagcttttctgaatcctccagtgagtaagggagagcccactgctaaaaaaggcctagtcaaatcctcaggtgtacatggacatcaagattgggaacaagccggctggtgcatccaaaccctcctgcgttccgacgtcgtgcccatgaccacagagaattttctctacatgtgcacccatttaaaggactcggcttcaagggaagcagcttccaccgcattatcccccagttcatttgccagggcagtgatttcacaaaccacggtggcaccaggggtctgcgcagncatggcactaagtgtcccatggcacatttggccctcatggaggctcaaaagggcaggaccagcaccctctttacggaggaaggaacgggcacanagaaacaaggaga

SEQ ID NO: 660 - DNA, 438 bp, Artificial Sequence
  Description of Artificial sequences:primer
  misc_feature (1)..(438): 5' terminal sequence from clone image:302453. guanylate kinase 1(GUK1) gene.
  misc_feature (254)..(254): n is a, c, g, or t
  misc_feature (403)..(403): n is a, c, g, or t
  misc_feature (419)..(419): n is a, c, g, or t
  misc_feature (428)..(428): n is a, c, g, or t
  misc_feature (434)..(434): n is a, c, g, or t
tctaatccaacagttattttattaggatgtcagccctgggtccagagtgagagatagggacaggggacagcccagcgaggctggttcgggggtcaccccaggatgttccaaccacaggggcagcatctcctccactccacatgctggccaagggacagagctgccgtatcgcctgccaagggggtggctcaatgctgctgccctggtcctgtatgggcccggggtgccgagaacagacagcaagcctcagggcncggtcctttgagctttcttgatttcctcagagagcgcctccttcagctctgcgtaggcctggtccaggctgtcgttaatgatgaccacatcaaacaggccgggctccttgctgctctccatgtcggcctgggcagcagcagccgcttcncaggcttcctcggttnagtgttgcntgcgancgtg

SEQ ID NO: 661 - DNA, 1082 bp, Artificial Sequence
  Description of Artificial sequences:primer
  misc_feature (1)..(1082): guanylate kinase 1(GUK1) gene.
ggcacgaggcgctggccgggctggctgcggccgccctgggccgggccccaccggacggcttgctctgctctttacctggggttgctgtcgaggaccctgtgcaagactcggccggtttttctttctccctgatggacagacccaaacatagccgcgcagcatcgtgaagggctggggccttcactcctctgtggctctggaagagcccgatttcctcaggaggcatgtcgggccccaggcctgtggtgctgagcgggccttcgggagctgggaagagcaccctgctgaagaggctgctccaggagcacagcggcatctttggcttcagcgtgtcccataccacgaggaacccgaggcccggcgaggagaacggcaaagattactactttgtaaccagggaggtgatgcagcgtgacatagcagccggcgacttcatcgagcatgccgagttctcggggaacctgtatggcacgagcaaggtggcggtgcaggccgtgcaggccatgaaccgcatctgtgtgctggacgtggacctgcagggtgtgcggaacatcaaggccaccgatctgcggcccatctacatctctgtgcagccgccttcactgcacgtgctggagcagcggctgcggcagcgcaacactgaaaccgaggagagcctggtgaagcggctggctgctgcccaggccgacatggagagcagcaaggagcccggcctgtttgatgtggtcatcattaacgacagcctggaccaggcctacgcagagctgaaggaggcgctctctgaggaaatcaagaaagctcaaaggaccggcgcctgaggcttgctgtctgttctcggcaccccgggcccatacaggaccagggcagcagcattgagccacccccttggcaggcgatacggcagctctgtgcccttggccagcatgtggagtggaggagatgctgcccctgtggttggaacatcctggggtgacccccgacccagcctcgctgggctgtcccctgtccctatctctcactctggacccagggctgacatcctaataaaataactgttggattagaaaaaaaaaaaaaaaaaa

SEQ ID NO: 662 - DNA, 606 bp, Artificial Sequence
  Description of Artificial sequences:primer
  misc_feature (1)..(606): 3' terminal sequence from clone image:305045. heat shock 70kda protein 9b (mortalin-2)(HSPA9B) gene.
  misc_feature (424)..(424): n is a, c, g, or t
  misc_feature (468)..(468): n is a, c, g, or t
  misc_feature (487)..(487): n is a, c, g, or t
  misc_feature (500)..(500): n is a, c, g, or t
  misc_feature (535)..(535): n is a, c, g, or t
  misc_feature (551)..(551): n is a, c, g, or t
  misc_feature (572)..(572): n is a, c, g, or t
  misc_feature (586)..(586): n is a, c, g, or t
  misc_feature (594)..(594): n is a, c, g, or t
tttttagaatattgtgaactttatactgttagaatcactgtccattaaatgatcactagctaatggtcactaaatttacaaattaaggaaattatatatagaatactgcaaaaacacagtaaaaagactgaagttcgcccatttctgctcaggaagtctcttcactcctaagcttcatatgttgtccttctggcttcaaaatttctgctattattactgtttttcctccttttgatcttccttttgttccccagtgccagaacttccagagccttctcgctcagatgccatctttttgtatgccatttcgaacagcttcaatgatgcctgctgaagagaggatgctgcctgtctaatattttctcctgtttcgctgtcttttctagccaggagtcccccattttggaaatctcttctttcagcntggtgcactccatcagcaggtaattgggccttgaattcttccancttgggttctgtgtcgtgnaatgattccttcnagccatattaaatggttcaaatcggtccctctttnggccgggctttccccngtgccgaattcttggcccganggcaaattccctanagtgagcngaataaaaccga

SEQ ID NO: 663 - DNA, 430 bp, Artificial Sequence
  Description of Artificial sequences:primer
  misc_feature (1)..(430): 5' terminal sequence from clone image:305045. heat shock 70kda protein 9b (mortalin-2)(HSPA9B) gene.
  misc_feature (1)..(1): n is a, c, g, or t
  misc_feature (47)..(47): n is a, c, g, or t
  misc_feature (382)..(382): n is a, c, g, or t
  misc_feature (387)..(387): n is a, c, g, or t
  misc_feature (402)..(402): n is a, c, g, or t
  misc_feature (412)..(412): n is a, c, g, or t
  misc_feature (426)..(426): n is a, c, g, or t
ngaagaccggcgaaagaaggaacgagttgaagcagttaatatggctncaggaatcattcacgacacagaaaccaagatggaagaattcaaggaccaattacctgctgatgagtgcaacaagctgaaagaagagatttccaaaatgagggagctcctggctagaaaagacagcgaaacaggagaaaatattagacaggcagcatcctctcttcagcaggcatcattgaagctgttcgaaatggcatacaaaaagatggcatctgagcgagaaggctctggaagttctggcactgggggaacaaaagggaagattcaaaagggagggaaaaaccagttaattaattaggcaggaattttttggaaagccccggaaaggggccanccttnttggaaggctttagngagttggaangaagactttccctncccc

SEQ ID NO: 664 - DNA, 2852 bp, Artificial Sequence
  Description of Artificial sequences:primer
  misc_feature (1)..(2852): heat shock 70kda protein 9b (mortalin-2)(HSPA9B) gene.
ggaggtttccagaagcgctgccgccaccgcatcgcgcagctctttgccgtcggagcgcttgtttgctgcctcgtactcctccatttatccgccatgataagtgccagccgagctgcagcagcccgtctcgtgggcgccgcagcctcccggggccctacggccgcccgccaccaggatagctggaatggccttagtcatgaggcttttagacttgtttcaaggcgggattatgcatcagaagcaatcaagggagcagttgttggtattgatttgggtactaccaactcctgcgtggcagttatggaaggtaaacaagcaaaggtgctggagaatgccgaaggtgccagaaccaccccttcagttgtggcctttacagcagatggtgagcgacttgttggaatgccggccaagcgacaggctgtcaccaacccaaacaatacattttatgctaccaagcgtctcattggccggcgatatgatgatcctgaagtacagaaagacattaaaaatgttccctttaaaattgtccgtgcctccaatggtgatgcctgggttgaggctcatgggaaattgtattctccgagtcagattggagcatttgtgttgatgaagatgaaagagactgcagaaaattacttggggcacacagcaaaaaatgctgtgatcacagtcccagcttatttcaatgactcgcagagacaggccactaaagatgctggccagatatctggactgaatgtgcttcgggtgattaatgagcccacagctgctgctcttgcctatggtctagacaaatcagaagacaaagtcattgctgtatatgatttaggtggtggaacttttgatatttctatcctggaaattcagaaaggagtatttgaggtgaaatccacaaatggggataccttcttaggtggggaagactttgaccaggccttgctacggcacattgtgaaggagttcaagagagagacaggggttgatttgactaaagacaacatggcacttcagagggtacgggaagctgctgaaaaggctaaatgtgaactctcctcatctgtgcagactgacatcaatttgccctatcttacaatggattcttctggacccaagcatttgaatatgaagttgacccgtgctcaatttgaagggattgtcactgatctaatcagaaggactatcgctccatgccaaaaagctatgcaagatgcagaagtcagcaagagtgacataggagaagtgattcttgtgggtggcatgactaggatgcccaaggttcagcagactgtacaggatctttttggcagagccccaagtaaagctgtcaatcctgatgaggctgtggccattggagctgccattcagggaggtgtgttggccggcgatgtcacggatgtgctgctccttgatgtcactcccctgtctctgggtattgaaactctaggaggtgtctttaccaaacttattaataggaataccactattccaaccaagaagagccaggtattctctactgccgctgatggtcaaacgcaagtggaaattaaagtgtgtcagggtgaaagagagatggctggagacaacaaactccttggacagtttactttgattggaattccaccagcccctcgtggagttcctcagattgaagttacatttgacattgatgccaatgggatagtacatgtttctgctaaagataaaggcacaggacgtgagcagcagattgtaatccagtcttctggtggattaagcaaagatgatattgaaaatatggttaaaaatgcagagaaatatgctgaagaagaccggcgaaagaaggaacgagttgaagcagttaatatggctgaaggaatcattcacgacacagaaaccaagatggaagaattcaaggaccaattacctgctgatgagtgcaacaagctgaaagaagagatttccaaaatgagggagctcctggctagaaaagacagcgaaacaggagaaaatattagacaggcagcatcctctcttcagcaggcatcactgaagctgttcgaaatggcatacaaaaagatggcatctgagcgagaaggctctggaagttctggcactggggaacaaaaggaagatcaaaaggaggaaaaacagtaataatagcagaaattttgaagccagaaggacaacatatgaagcttaggagtgaagagacttcctgagcagaaatgggcgaacttcagtctttttactgtgtttttgcagtattctatatataatttccttaatttgtaaatttagtgaccattagctagtgatcatttaatggacagtgattctaacagtataaagttcacaatattctatgtccctagcctgtcatttttcagctgcatgtaaaaggaggtaggatgaattgatcattataaagatttaactattttatgctgaagtgaccatattttcaaggggtgaaaccatctcgcacacagcaatgaaggtagtcatccatagacttgaaatgagaccacatatggggatgagatccttctagttagcctagtactgctgtactggcctgtatgtacatggggtccttcaactgaggccttgcaagtcaagctggctgtgccatgtttgtagatggggcagaggaatctagaacaatgggaaacttagctatttatattaggtacagctattaaaacaaggtaggaatgaggctagacctttaacttccctaaggcatacttttctagctaccttctgccctgtgtctggcacctacatccttgatgattgttctcttacccattctggaatttttttttttttaaataaatacagaaagcatcttgaaaaaaaaaaaaaaaaaa

SEQ ID NO: 665 - DNA, 439 bp, Artificial Sequence
  Description of Artificial sequences:primer
  misc_feature (1)..(439): 3' terminal sequence from clone image:306510. nadh dehydrogenase (ubiquinone) 1 alpha subcomplex, 6, 14kda(NDUFA6) gene.
ttttttttcagttcttgaacctgtgttgatgtttattctgccactgagaggtacaccagggtttccaaagacagtaggaatatttctgttctctgtgtatattgaacagctgtgcacctaagcagggtgcctgagtaggaagttaatttcattttaagggctggagcttgttacaagtagcggccaaagcctttgcacatccattttcttcagaacccaaggaaaactagcccatcttgacagctctacttttgcgcctgttaagtgctgccctgatccctgacaggaagagctggctaattttagataatctgtgccctgacactaaagtgtctaatcataggggctatagaaacaactacattaacaagtcgtccagcctcatgcccaatgtcacaatttttgaacagatgggctccttccttcccgtttactgaca

SEQ ID NO: 666 - DNA, 416 bp, Artificial Sequence
  Description of Artificial sequences:primer
  misc_feature (1)..(416): 5' terminal sequence from clone image:306510. nadh dehydrogenase (ubiquinone) 1 alpha subcomplex, 6, 14kda(NDUFA6) gene.
  misc_feature (2)..(2): n is a, c, g, or t
  misc_feature (44)..(44): n is a, c, g, or t
  misc_feature (90)..(90): n is a, c, g, or t
gnggcaagatggcggggagggcgtccgcaacgttacttctacantccagcaccttcgtgaagcccattttcagtcgggacatgaacgagnccaagcggagggtgcgcgactcttaccgcgcctggtatcgggaggtgccgaacactgtgcaccaattccagctggacatcactgtgaaaatgggacgggataaagtccgagaaatgtttatgaagaatgcccatgtcacagaccccagggtggttgatcttctggtcattaagggaaagatcgaactggaagaaacaattaaagtatggaagcagcggacacatgttatgcggttcttccattgaaacagaagcgccaaggccaaaggatttcctatccaagttctatgtttggccacgatccattgaagtcattcagtggaaaga

SEQ ID NO: 667 - DNA, 1063 bp, Artificial Sequence
  Description of Artificial sequences:primer
  misc_feature (1)..(1063): nadh dehydrogenase (ubiquinone) 1 alpha subcomplex, 6, 14kda(NDUFA6) gene.
gatggcggggagcggcgtccgccaagctacttctaccgccagcaccttcgtgaagcccattttcagtcgggacatgaacgaggccaagcggagggtgcgcgagctctaccgcgcctggtatcgggaggtgccgaacactgtgcaccaattccagctggacatcactgtgaaaatgggacgggataaagtccgagaaatgtttatgaagaatgcccatgtcacagaccccagggtggttgatcttctggtcattaagggaaagatcgaactggaagaaacaattaaagtatggaagcagcggacacatgttatgcggttcttccatgaaacagaagcgccaaggccaaaggatttcctatccaagttctatgttggccacgatccatgaagtcattcagtggaaagatgcacgttgatactattttagagcacaaataaactcactatacaatggtcactttgtgatagaattccattgatgaaccaattttctgcagcctctttttgcctgagcaagtgggaccttggtatacacatcacctgttctttcccttttcttgaaatgtggtgtttgctgtaaattggattgaattatttttctcagagccttgcatgtcagtaaacaggaaggaaggaggccatctgttcaaaaattgtgacattgggcatgaggctggacgacttgttaatgtagttgtttctatagcccctatgattagacacttcagtgtcagggcacagattatctaaaattagccagctcttcctgtcagggatcagggcagcactaacaggcgcaaaagtagagctgtcaagatgggctagttttccttgggttctgaagaaaatggatgtgcaaaggcttggctccgctacttgtaacaagctccagcccttaaaatgaaattaacttcctactcaggcaccctgcttaggtgcacagctgttcaatatacacagagaacagaaatattcctactgtctttggaaaccctggtgtacctctcagtggcagaataaacatcaacacaggttcaagaactgaaaaaaaaaaaaaaaaaaa

SEQ ID NO: 668 - DNA, 592 bp, Artificial Sequence
  Description of Artificial sequences:primer
  misc_feature (1)..(592): 3' terminal sequence from clone image:306555. interferon gamma receptor 2 (interferon gamma transducer 1)(IFNGR2) gene.
  misc_feature (136)..(136): n is a, c, g, or t
  misc_feature (177)..(177): n is a, c, g, or t
  misc_feature (332)..(332): n is a, c, g, or t
  misc_feature (457)..(457): n is a, c, g, or t
  misc_feature (532)..(532): n is a, c, g, or t
  misc_feature (557)..(557): n is a, c, g, or t
ttttttaaaaaacatgcactatacaatcttttatttccagtttaaaaacaaaatcttaaattactaggagtatatttacaagattaattacattttaagccagcacaccatggatgtacatgaagggccactcggngtgtccctcgctgggacaggttgtgtgacctgcccaagggntcccggctcatttgccaaagtcaagacgacgaccaggtcttctgactgctcaagcccaaccaataatgaaaaaagtatcagagatgtgtcatatccattttgctaacaagcaattacatgcctttttagtgtttaagagaagccctaattttccnggggatatctccgtaaaatcattctggaatttgatttttgaaaattccttaagaaaaaaaaaaaagcttggtcacccccatgagacctgctgtctctcatgtctgcagggacagggcctttaganggcagcaaaggggaatactggtctctgggaagtccagaccggaactcctagcagctccgatggcttgatctcttnccagggaggccagtgggttaggccntggctttgggttcaagcggtttggggaacacctcc

SEQ ID NO: 669 - DNA, 341 bp, Artificial Sequence
  Description of Artificial sequences:primer
  misc_feature (1)..(341): 5' terminal sequence from clone image:306555. interferon gamma receptor 2 (interferon gamma transducer 1)(IFNGR2) gene.
  misc_feature (43)..(43): n is a, c, g, or t
  misc_feature (72)..(73): n is a, c, g, or t
  misc_feature (75)..(75): n is a, c, g, or t
  misc_feature (249)..(249): n is a, c, g, or t
  misc_feature (254)..(255): n is a, c, g, or t
  misc_feature (270)..(270): n is a, c, g, or t
  misc_feature (274)..(274): n is a, c, g, or t
  misc_feature (280)..(280): n is a, c, g, or t
  misc_feature (289)..(289): n is a, c, g, or t
  misc_feature (293)..(293): n is a, c, g, or t
  misc_feature (332)..(332): n is a, c, g, or t
gagctgcccgctcctcagcacccgaagattcgcctgtacaacncagagaggtcctgagttgggagccagtgnncntgagcaatagcacgaggcctgttgtctaccaagtgcagtttaaatacaccgacagtaaatggttcacggccgacatcatgtccataggggtgaattgtacacagatcacagcaacagagtgtgacttcactgccgccagtccctcaagaaaggcttccccaatggatttcaatntcacnntacggcttcgagctnaacngggaanacttcattnttgnctgggttgaaatgccttggtttcaacaactaatcgggantgtgactgt

SEQ ID NO: 670 - DNA, 2214 bp, Artificial Sequence
  Description of Artificial sequences:primer
  misc_feature (1)..(2214): interferon gamma receptor 2 (interferon gamma transducer 1)(IFNGR2) gene.
gttgactggaggcggaggttgcagtgagccgagatcgccccactgcactccagcctggtgactccgtctcaaaaaaaaggggaggggggcgggggagagttgaaagcttaatatgtactttgggggctattaaagcaaacatttcgactaaaggggcgaatcctcgaattgtgcgatcaagcacccgagaggagagttggggggggtcaggaggggtgggggctccagggaacgcccgggggcctgggccggggtctcgcggggcccttccggaaggatcgcggcccccgaaggtgggcgtcccgcggggctccagtctccaggacgttccgggaggctccgcgctctgggaggccggctgcgtggggtccccgcgctgcagccgcagaggccccccagggccgcggttcccggagcgggaaagtcccgcgcgggggcggtggcctcgggggcgggacggggcgggggcgggggcgcgggcggccgagccgaatcccctccaccgggacgccccgctgccgctcgggaagaggcgggccctgcgcgccctgcgctcgccatggcggtttgggcggcgacgtgagcggctccgcggaccccgagcggggccccggccgcgacctgagccgccgccgagcgcccggggccatgcgaccgacgctgctgtggtcgctgctgctgctgctcggagtcttcgccgccgccgccgcggccccgccagaccctctttcccagctgcccgctcctcagcacccgaagattcgcctgtacaacgcagagcaggtcctgagttgggagccagtggccctgagcaatagcacgaggcctgttgtctaccgagtgcagtttaaatacaccgacagtaaatggttcacggccgacatcatgtccataggggtgaattgtacacagatcacagcaacagagtgtgacttcactgccgccagtccctcagcaggcttcccaatggatttcaatgtcactctacgccttcgagctgagctgggagcactccattctgcctgggtgacaatgccttggtttcaacactatcggaatgtgactgtcgggcctccagaaaacattgaggtgaccccaggagaaggctccctcatcatcaggttctcctctccctttgacatcgctgatacctccacggcctttttttgttattatgtccattactgggaaaaaggaggaatccaacaggtcaaaggccctttcagaagcaactccatttcattggataacttaaaaccctccagagtgtactgtttacaagtccaggcacaactgctttggaacaaaagtaacatctttagagtcgggcatttaagcaacatatcttgctacgaaacaatggcagatgcctccactgagcttcagcaagtcatcctgatctccgtgggaacattttcgttgctgtcggtgctggcaggagcctgtttcttcctggtcctgaaatatagaggcctgattaaatactggtttcacactccaccaagcatcccattacagatagaagagtatttaaaagacccaactcagcccatcttagaggccttggacaaggacagctcaccaaaggatgacgtctgggactctgtgtccattatctcgtttccggaaaaggagcaagaagatgttctccaaacgctttgaaccaaagcatgggcctagcccactggctccctggaagagatcaagccatcggagctgctagagttctgtctggactttccagagaccagtattcccttttgctgcctctaaaaggcctgtccctgcagacatgagagacagcaggtctcatgggggtgacaagcttttttttttttttcttaaagaattttcaaaatcaaattccagaatgattttacggagatatcccaggaaaattaaggcttctcttaaacactaaaaaggcatgtaattgcttgttagcaaaatggatatgacacatctctgatacttttttcattattggttgggctgagcagtcagaagacctggtcgtcgtcttgactttggcaaatgagccggagccccttgggcaggtcacacaacctgtcccagcgagggacactgagtggcccttcatgtacatccatggtgtgctggcttaaaatgtaattaatcttgtaaatatactcctagtaatttaagattttgtttttaaactggaaataaaagattgtatagtgcatgtttttt

SEQ ID NO: 671 - DNA, 208 bp, Artificial Sequence
  Description of Artificial sequences:primer
  misc_feature (1)..(208): 3' terminal sequence from clone image:306697. hrihfb2206 protein(HRIHFB2206) gene.
taaaaaccttactttttgtttaatttgttttgccaaacaaacacagtgaaaactttagtctgactaattgtacagaaaatagaatttgtaaccagtagcaaacaaaacaggataaacctaagtccctggcaagctggatctccatcagcaggtcatccagatccccttgtaaatggcctcctgggaaaataagtcctaggaggcagag

SEQ ID NO: 672 - DNA, 261 bp, Artificial Sequence
  Description of Artificial sequences:primer
  misc_feature (1)..(261): 5' terminal sequence from clone image:306697. hrihfb2206 protein(HRIHFB2206) gene.
gtgaactggtgccccggcagccagctggactctcttgctggtgacctggcatcctcaattgtttcctcctgaagtggaagctggggccttagactctgccctggtgacaccagcaattatgactttgtctacccttcctccccagttattgttgcagattctggttaagcagaggcttcagaaccactgaacttgaaacttaccctctagggatgcaggtgggatgtccagggactataggtttgggaaaaccatacctta

SEQ ID NO: 673 - DNA, 191 bp, Artificial Sequence
  Description of Artificial sequences:primer
  misc_feature (1)..(191): 3' terminal sequence from clone image:307094. glycine c-acetyltransferase (2-amino-3-ketobutyrate coenzyme a ligase)(GCAT) gene.
tttttttttttttttttttttttcacagccaattttcacactgttgtttcacattctcacagccctcagcacaggtcacgtcccagcccagctctgggactttggttcagggctcagagcctctggtctgggctgatcgaaaacctcctttgaccctgtggcagtaggcggaccttggggaccttgggccc

SEQ ID NO: 674 - DNA, 459 bp, Artificial Sequence
  Description of Artificial sequences:primer
  misc_feature (1)..(459): 5' terminal sequence from clone image:307094. glycine c-acetyltransferase (2-amino-3-ketobutyrate coenzyme a ligase)(GCAT) gene.
  misc_feature (14)..(14): n is a, c, g, or t
  misc_feature (196)..(196): n is a, c, g, or t
  misc_feature (210)..(210): n is a, c, g, or t
  misc_feature (334)..(334): n is a, c, g, or t
  misc_feature (441)..(441): n is a, c, g, or t
  misc_feature (450)..(450): n is a, c, g, or t
caaggcaggtctgnaggctctggaggagtttggagctggcctcagctctgtccgctttatctgtggaacccaagagcatccacaagaatctagaagcaaaaatagcccgcttccaccagcgggaggatgccatcctctatcccagctgttatgacgccaacgccggcctctttgagccctgctgaccccagagganacagctcttctcgngacgagctgaaccatgcctccatcatcgacggcatccggctgtgaaggcccacaagtaccgctatcgccacctggacatggccgacctagaagccaagcttgcaggaggcccaagaaagcatcnggcttgcgccttggttggccactggattgggggcctttttcccattgggattgggccgacattcggcaccccttgcaaggaagatcttgcttgccttcgccttctangatatggtngcccttggt

SEQ ID NO: 675 - DNA, 1470 bp, Artificial Sequence
  Description of Artificial sequences:primer
  misc_feature (1)..(1470): glycine c-acetyltransferase (2-amino-3-ketobutyrate coenzyme a ligase)(GCAT) gene.
gctcgggcgaggtaggagcgatgtggcctgggaacgcctggcgcgccgcactcttctgggtgccccgcggccgccgcgcacagtcagcgctggcccagctgcgtggcattctggagggggagctggaaggcatccgcggagctggcacttggaagagtgagcgggtcatcacgtcccgtcaggggccgcacatccgcgtggacggcgtctccggaggaatccttaacttctgtgccaacaactacctgggcctgagcagccaccctgaggtgatccaggcaggtctgcaggctctggaggagtttggagctggcctcagctcggtccgctttatctgtggaacccagagcatccacaagaatctagaagcaaaaatagcccgcttccaccagcgggaggatgccatcctctatcccagctgttatgacgccaacgccggcctctttgaggccctgctgaccccagaggacgcagtcctgtcggacgagctgaaccatgcctccatcatcgacggcatccggctgtgcaaggcccacaagtaccgctatcgccacctggacatggccgacctagaagccaagctgcaggaggcccagaagcatcggctgcgcctggtggccactgatggggccttttccatggatggcgacatcgcacccctgcaggagatctgctgcctcgcctctagatatggtgccctggtcttcatggatgaatgccatgccactggcttcctggggcccacaggacggggcacagatgagctgctgggtgtgatggaccaggtcaccatcatcaactccaccctggggaaggccctgggtggagcatcagggggctacacgacagggcctgggcccctggtgtccctgctgcggcagcgcgcccggccatacctcttctccaacagtctgccacctgctgtcgttggctgcgcctccaaggccctagatctgctgatggggagtaacaccattgtccagtctatggctgccaagacccagaggttccgtagtaagatggaagctgctggcttcactatctcgggagccagtcaccccatctgccctgtgatgctgggtgatgcccggctggcctctcgcatggcggatgacatgctgaagagaggcatctttgtcatcgggttcagctaccccgtggtccccaagggcaaggcccggatccgggtacagatctcagcagtgcatagcgaggaagacattgaccgctgcgtggaggccttcgtggaagtggggcgactgcacggggcactgccctgagctctgggtaaggacgagaagagccaaggtccgcctactgccacagggtcaaaggaggttttcgatcagcccagaccagaggctctgagccctgaaccaaagtcccagagctgggctgggacgtgacctgtgctgagggctgtgagaatgtgaaacaacagtgtgaaaattggctgtgaaaaaaaaaaaa

SEQ ID NO: 676 - DNA, 235 bp, Artificial Sequence
  Description of Artificial sequences:primer
  misc_feature (1)..(235): 3' terminal sequence from clone image:307352. cd9 antigen (p24)(CD9) gene.
  misc_feature (196)..(196): n is a, c, g, or t
ttttttttttttttttgacattgtcataattttttattatgtatcaaattgtcttcaatataagttacaacttgattaaagttgatagacatttgtatctatttaaagacaaaaaaattcttttatgtacaatatcttgtctagagtctagcaaatatagtacctttcattgcaggatttctgcttaatataacangcaaaaacaaacaactgaaaaaatataaaccaaagcaaa

SEQ ID NO: 677 - DNA, 269 bp, Artificial Sequence
  Description of Artificial sequences:primer
  misc_feature (1)..(269): 5' terminal sequence from clone image:307352. cd9 antigen (p24)(CD9) gene.
  misc_feature (247)..(247): n is a, c, g, or t
  misc_feature (253)..(253): n is a, c, g, or t
gccgtgcgtcatgatatttggcatgatcttcagtatgatcttgtgctgtgctatccgcagaaccgcgagatggtctagagtcagcttacatccctgagcaggaaagtttacccatgaagattggtgggattttttgtttgtttgttttgttttgtttgttgtttgttcgtttgtttttttgccactaattttagtattcattctgcattgctagataaaagctgaagttactttatgtttgtctttnaatgcnacattcaatatccaca

SEQ ID NO: 678 - DNA, 1246 bp, Artificial Sequence
  Description of Artificial sequences:primer
  misc_feature (1)..(1246): cd9 antigen (p24)(CD9) gene.
gaccagcctacagccgcctgcatctgtatccagcgccaggtcccgccagtcccagctgcgcgcgccccccagtcccgcacccgttcggcccaggctaagttagccctcaccatgccggtcaaaggaggcaccaagtgcatcaaatacctgctgttcggatttaacttcatcttctggcttgccgggattgctgtccttgccattggactatggctccgattcgactctcagaccaagagcatcttcgagcaagaaactaataataataattccagcttctacacaggagtctatattctgatcggagccggcgccctcatgatgctggtgggcttcctgggctgctgcggggctgtgcaggagtcccagtgcatgctgggactgttcttcggcttcctcttggtgatattcgccattgaaatagctgcggccatctggggatattcccacaaggatgaggtgattaaggaagtccaggagttttacaaggacacctacaacaagctgaaaaccaaggatgagccccagcgggaaacgctgaaagccatccactatgcgttgaactgctgtggtttggctgggggcgtggaacagtttatctcagacatctgccccaagaaggacgtactcgaaaccttcaccgtgaagtcctgtcctgatgccatcaaagaggtcttcgacaataaattccacatcatcggcgcagtgggcatcggcattgccgtggtcatgatatttggcatgatcttcagtatgatcttgtgctgtgctatccgcaggaaccgcgagatggtctagagtcagcttacatccctgagcaggaaagtttacccatgaagattggtgggattttttgtttgtttgttttgttttgtttgttgtttgttgtttgtttttttgccactaattttagtattcattctgcattgctagataaaagctgaagttactttatgtttgtcttttaatgcttcattcaatattgacatttgtagttgagcggggggtttggtttgctttggtttatattttttcagttgtttgtttttgcttgttatattaagcagaaatcctgcaatgaaaggtactatatttgctagactctagacaagatattgtacataaaagaatttttttgtctttaaatagatacaaatgtctatcaactttaatcaagttgtaacttatattgaagacaatttgatacataataaaaaattatgacaatgtcaaaaaaaaaaaaaaa

SEQ ID NO: 679 - DNA, 565 bp, Artificial Sequence
  Description of Artificial sequences:primer
  misc_feature (1)..(565): 3' terminal sequence from clone image:310057. esterase d/formylglutathione hydrolase(ESD) gene.
  misc_feature (489)..(489): n is a, c, g, or t
  misc_feature (542)..(542): n is a, c, g, or t
  misc_feature (557)..(557): n is a, c, g, or t
tttttgctcagcaatacagttgcattttacaacttttataatcctgaagagattctcttatttggagttttttcatgcattcaggtatttagcatgatgtctgatgtggtcagtaataaaggttgcaatgaagtagtagctatgatcataaccctcttgcaatcgaaaaacaacggggattttcttttctgtacaggcagctatgaagttatcagggagtaactgtccatctaaaagaaactggtcatctttcccttgatcaattagtatgtccagctgagatcctggataggatttcacaaggtgggtagcatcataagccttccatttactttgatctgttcccaaatatccactaaaggcttttttgccccagggacagagtacagggttgcaaattggagcaatgctgacacagatttggattttccaggatttttcaaagcacagatcagagctccatgacctcccatggagtgggccaaaatngacatcctttgggggatccactggaaaattggcatttatgagttggggaagcncccccgtgacaaagnggacattc

SEQ ID NO: 680 - DNA, 409 bp, Artificial Sequence
  Description of Artificial sequences:primer
  misc_feature (1)..(409): 5' terminal sequence from clone image:310057. esterase d/formylglutathione hydrolase(ESD) gene.
  misc_feature (27)..(27): n is a, c, g, or t
  misc_feature (45)..(45): n is a, c, g, or t
  misc_feature (52)..(52): n is a, c, g, or t
  misc_feature (54)..(54): n is a, c, g, or t
  misc_feature (87)..(87): n is a, c, g, or t
  misc_feature (115)..(115): n is a, c, g, or t
  misc_feature (141)..(141): n is a, c, g, or t
  misc_feature (157)..(157): n is a, c, g, or t
  misc_feature (173)..(175): n is a, c, g, or t
  misc_feature (181)..(181): n is a, c, g, or t
  misc_feature (304)..(304): n is a, c, g, or t
  misc_feature (311)..(311): n is a, c, g, or t
  misc_feature (323)..(323): n is a, c, g, or t
  misc_feature (335)..(335): n is a, c, g, or t
  misc_feature (380)..(380): n is a, c, g, or t
  misc_feature (385)..(385): n is a, c, g, or t
  misc_feature (405)..(405): n is a, c, g, or t
acttaccaccaaaaggcaggaaacatngaaagtgccctgcctgtncttggcncncaggtttaacttgcacagagcaaaattttatancagaagtctggttgtcatcagtctgctncagaacatggtcttgttgtcattgcnccagataccaagcccncgtggtgcaaatattnnnggtgangatgagagctgggactttggcactggtgctggattttatgttgatgccactgaacgatccttggaaaaccaactacacgaatgtactcttatgtcacatgcggagcttccccaactcacaaantgccaanttttccagtggntccccaaaaggntgtctatttttggccactccatgggaggtcatggagctctgatcngtgcnttggaaaatcctggaaaatncaaa

SEQ ID NO: 681 - DNA, 367 bp, Artificial Sequence
  Description of Artificial sequences:primer
  misc_feature (1)..(367): 3' terminal sequence from clone image:310088. zinc finger protein 183 (ring finger, c3hc4 type)(ZNF183) gene.
tttttcattttatttttattaagcactacataacacattgcatgctacataatacactgtaaccttctagcaggggtagatggccataactgagttatttttttcatcaatcaggaaaatgcttccttaatcaatgttctccaaaccctttgacacatagtaacgatcaactccagagatgcgcctatctctttccatcagactccagtgatacccaaaatgagcaacccttttttccttgcccccgttagtgaacctgtggatgtacgcagtagccagtcctggaatcaacaagcacacgcccatgacggagagtccggggagaatctccgaaccacatctctgccccgttacctaggccaaaacc

SEQ ID NO: 682 - DNA, 395 bp, Artificial Sequence
  Description of Artificial sequences:primer
  misc_feature (1)..(395): 5' terminal sequence from clone image:310088. zinc finger protein 183 (ring finger, c3hc4 type)(ZNF183) gene.
agccaaggtcacctttcaaggacccagaagtagggttttggcctaggtaacggggcagagatgtggttcgagattctccccggactctccgtcatgggcgtgtgcttgttgattccaggactggctactgcgtacatccacaggttcactaacgggggcaaggaaaaaagggttgctcattttgggtatcactggagtctgatggaaagagataggcgcatctctggagttgatcgttactatgtgtcaaagggtttggagaacattgattaaggaagcattttcctgattgatgaaaaaaataactcagttatggccatctacccctgctagaaggttacagtgtattatgtagcatgcaatgtgttatgtagtgcttaataaaaataaaatga

SEQ ID NO: 683 - DNA, 1349 bp, Artificial Sequence
  Description of Artificial sequences:primer
  misc_feature (1)..(1349): zinc finger protein 183 (ring finger, c3hc4 type)(ZNF183) gene.
cggccgcccgcgagcggcgtgccacgtacggctccggccgaagcgacggcctctgctagggcacaagagagacgggcgctcgcgtctcgcagtcctcttccgtcagtgtcttttgcttcgactcccggcggagcgcgcaacgtggagtgacgtgcaggggccaagtgcaacccaggcagccacggctgtttcggagctcaggactctaaaatggcagagcagctttctccaggaaaggcggtggatcaggtgtgcaccttccttttcaaaaagcctgggcggaaaggggctgctggacgcagaaagcgcccggcctgcgacccagagcccggagaaagcggcagcagtagcgacgaaggctgcactgtggttcgaccggaaaagaagcgggtgacccacaatccaatgatacagaagacccgtgacagtggtaaacagaaggcggcttacggcgacttgagcagcgaagaggaagaggaaaatgagcccgagagtctcggcgtggtttataaatccacccgttcggcgaaacccgtgggaccagaggatatgggagcgacagctgtctatgagctggacacagagaaagagcgcgatgcacaagccatctttgagcgcagccagaagatccaggaggagctgaggggcaaggaggatgacaagatctatcggggaatcaacaattatcagaaatacatgaagcccaaggatacgtctatgggcaatgcctcttccgggatggtgaggaagggccccatccgagcgcccgagcatctacgtgccaccgtgcgctgggattaccagcccgacatctgtaaggactacaaagagactggcttctgcggcttcggagacagctgcaaattcctccatgaccgttcagattacaagcatgggtggcagatcgaacgtgagcttgatgagggtcgctatggtgtctatgaggatgaaaactatgaagtgggaagcgatgatgaggaaataccattcaagtgtttcatctgtcgccagagcttccaaaacccagttgtcaccaagtgcaggcattatttctgcgagagctgtgcactgcagcatttccgcaccaccccgcgctgctatgtctgtgaccagcagaccaatggcgtcttcaatccagcgaaagaattgattgctaaactagagaagcatcgagctacaggagagggtggtgcttccgacttgccagaagaccccgatgaggatgcaattcccattacttaggtttcccataattcttaaatttaaaaaataaacgttttgttcttttggaagtcttacttcgtgtccttcctttgtagagaaagtgacagagcaggcgggtggtgaag

SEQ ID NO: 684 - DNA, 429 bp, Artificial Sequence
  Description of Artificial sequences:primer
  misc_feature (1)..(429): 3' terminal sequence from clone image:31027. heat shock 70kda protein 8(HSPA8) gene.
  misc_feature (200)..(200): n is a, c, g, or t
  misc_feature (231)..(231): n is a, c, g, or t
  misc_feature (272)..(272): n is a, c, g, or t
  misc_feature (326)..(326): n is a, c, g, or t
  misc_feature (425)..(425): n is a, c, g, or t
ttttttttttttttgccatttggatttttttattctctttttaaatactgtacagtgaaaaataaatacgccttctcatccaccagacaaggttggtcccctccccaggggaccttgtcaccccccttcatacacacccctggttctactccaaaaccttccccgtgcctcccacccacttatctcttactatccccgtnttccacagtgatgaggccccagaaatggggngttacaggatgggaggagggatagcaggggaggccccctgnaacgggtcaaatctgggtgggttcgagggagcaccccccaccaacaggtggagnaatggggggtttttcagagaggagattggggggcattaggagggataaaagggcacatccagttttgatgggggaagggagagaggtttccctttaccntgga

SEQ ID NO: 685 - DNA, 450 bp, Artificial Sequence
  Description of Artificial sequences:primer
  misc_feature (1)..(450): 5' terminal sequence from clone image:31027. heat shock 70kda protein 8(HSPA8) gene.
  misc_feature (3)..(3): n is a, c, g, or t
  misc_feature (5)..(5): n is a, c, g, or t
  misc_feature (193)..(193): n is a, c, g, or t
  misc_feature (282)..(282): n is a, c, g, or t
  misc_feature (310)..(310): n is a, c, g, or t
  misc_feature (322)..(322): n is a, c, g, or t
  misc_feature (340)..(340): n is a, c, g, or t
  misc_feature (345)..(345): n is a, c, g, or t
  misc_feature (374)..(374): n is a, c, g, or t
  misc_feature (381)..(381): n is a, c, g, or t
  misc_feature (395)..(395): n is a, c, g, or t
  misc_feature (402)..(402): n is a, c, g, or t
  misc_feature (412)..(412): n is a, c, g, or t
  misc_feature (422)..(422): n is a, c, g, or t
gtnanagaaggacatcagtgagaacaagagagctgtaagacgcctccgtactgcttgtgaacgtgctaagcgtaccctctcttccagcacccaggccagtattgagatcgattctctctatgaaggaatcgacttctatacctccattacccgtgcccgatttgaagaactgaatgctgacctgttccgtggncaccctgggacccagtagagaaagcccttcgagatgccaaactaggacaagtcacagattcatgatattgtccgggttggtggttctantcgtatccccaagatttcaggaagcttnttccaaggattntttcaatgggaaaagaantggantaaggaggcattcaaccctggatggaggntgtttgnttatgggtggcagntgttccnggggaggccnttttgttctngggagacagttttgaggatgtttcaaga

SEQ ID NO: 686 - DNA, 2276 bp, Artificial Sequence
  Description of Artificial sequences:primer
  misc_feature (1)..(2276): heat shock 70kda protein 8(HSPA8) gene.
ctcattgaactcgcctgcagctcttgggttttttgtggcttccttcgttattggagccaggcctacaccccagcaaccatgtccaagggacctgcagttggtattgatcttggcaccacctactcttgtgtgggtgttttccagcacggaaaagtcgagataattgccaatgatcagggaaaccgaaccactccaagctatgtcgcctttacggacactgaacggttgatcggtgatgccgcaaagaatcaagttgcaatgaaccccaccaacacagtttttgatgccaaacgtctgattggacgcagatttgatgatgctgttgtccagtctgatatgaaacattggccctttatggtggtgaatgatgctggcaggcccaaggtccaagtagaatacaagggagagaccaaaagcttctatccagaggaggtgtcttctatggttctgacaaagatgaaggaaattgcagaagcctaccttgggaagactgttaccaatgctgtggtcacagtgccagcttactttaatgactctcagcgtcaggctaccaaagatgctggaactattgctggtctcaatgtacttagaattattaatgagccaactgctgctgctattgcttacggcttagacaaaaaggttggagcagaaagaaacgtgctcatctttgacctgggaggtggcacttttgatgtgtcaatcctcactattgaggatggaatctttgaggtcaagtctacagctggagacacccacttgggtggagaagattttgacaaccgaatggtcaaccattttattgctgagtttaagcgcaagcataagaaggacatcagtgagaacaagagagctgtaagacgcctccgtactgcttgtgaacgtgctaagcgtaccctctcttccagcacccaggccagtattgagatcgattctctctatgaaggaatcgacttctatacctccattacccgtgcccgatttgaagaactgaatgctgacctgttccgtggcaccctggacccagtagagaaagcccttcgagatgccaaactagacaagtcacagattcatgatattgtcctggttggtggttctactcgtatccccaagattcagaagcttctccaagacttcttcaatggaaaagaactgaataagagcatcaaccctgatgaagctgttgcttatggtgcagctgtccaggcagccatcttgtctggagacaagtctgagaatgttcaagatttgctgctcttggatgtcactcctctttcccttggtattgaaactgctggtggagtcatgactgtcctcatcaagcgtaataccaccattcctaccaagcagacacagaccttcactacctattctgacaaccagcctggtgtgcttattcaggtttatgaaggcgagcgtgccatgacaaaggataacaacctgcttggcaagtttgaactcacaggcatacctcctgcaccccgaggtgttcctcagattgaagtcacttttgacattgatgccaatggtatactcaatgtctctgctgtggacaagagtacgggaaaagagaacaagattactatcactaatgacaagggccgtttgagcaaggaagacattgaacgtatggtccaggaagctgagaagtacaaagctgaagatgagaagcagagggacaaggtgtcatccaagaattcacttgagtcctatgccttcaacatgaaagcaactgttgaagatgagaaacttcaaggcaagattaacgatgaggacaaacagaagattctggacaagtgtaatgaaattatcaactggcttgataagaatcagactgctgagaaggaagaatttgaacatcaacagaaagagctggagaaagtttgcaaccccatcatcaccaagctgtaccagagtgcaggaggcatgccaggaggaatgcctgggggatttcctggtggtggagctcctccctctggtggtgcttcctcagggcccaccattgaagaggttgattaagccaaccaagtgtagatgtagcattgttccacacatttaaaacatttgaaggacctaaattcgtagcaaattctgtggcagttttaaaaagttaagctgctatagtaagttactgggcattctcaatacttgaatatggaacatatgcacaggggaaggaaataacattgcactttataaacactgtattgtaagtggaaaatgcaatgtcttaaataaaactatttaaaattggcaccataaaaaaaaaaaaaaaa

SEQ ID NO: 687 - DNA, 301 bp, Artificial Sequence
  Description of Artificial sequences:primer
  misc_feature (1)..(301): 3' terminal sequence from clone image:310774. ribosomal protein l35(RPL35) gene.
  misc_feature (185)..(185): n is a, c, g, or t
  misc_feature (204)..(204): n is a, c, g, or t
  misc_feature (253)..(253): n is a, c, g, or t
  misc_feature (294)..(294): n is a, c, g, or t
tttttctcagccagctgtgtttattgacaatgcgcccctcaggccttgaccgcgtacttccgcagcgggtacagccgtccttccgctgctgcttcttggtcttcaggttctcctcgtgcttgttgagccggcgggcaatggcacgtgtcttcttaggccgcagtccaggggcttgtacttcttgnccttgtagaatttcctgangttttctttctgagtctggttaataactgtgagaacacggggaatgganttccggacgactcggaatcttagaaaagcttggaaggccgnaccgcct

SEQ ID NO: 688 - DNA, 358 bp, Artificial Sequence
  Description of Artificial sequences:primer
  misc_feature (1)..(358): 5' terminal sequence from clone image:310774. ribosomal protein l35(RPL35) gene.
  misc_feature (1)..(2): n is a, c, g, or t
  misc_feature (7)..(7): n is a, c, g, or t
  misc_feature (40)..(40): n is a, c, g, or t
  misc_feature (78)..(78): n is a, c, g, or t
  misc_feature (162)..(162): n is a, c, g, or t
nngcggnggcggcgttggcggcttgtgcagcaatggccantgttcaaggctcgagatcttcgcgggaagaagaaggangagctgctgaaacagctggacgacctgaaggtggagctgtcccagctgcgcgtcaccaaagtgacaggcggtgcggcctccaanctctctaagatccgagtcgtccggaaatccattccccgtgttctcacagttattaaccagactcagaaagaaaacctcaggaaattctacaagggcaagaagtacaagcccctggacctgcggcctaagaatgacacagtgccatgcgccgccgcttcaaacaagcacgaggagaaccctgaagaccaagaagcat

SEQ ID NO: 689 - DNA, 455 bp, Artificial Sequence
  Description of Artificial sequences:primer
  misc_feature (1)..(455): ribosomal protein l35(RPL35) gene.
cttcctctttccctcggagcgggcggcggcgttggcggcttgtgcagcaatggccaagatcaaggctcgagatcttcgcgggaagaagaaggaggagctgctgaaacagctggacgacctgaaggtggagctgtcccagctgcgcgtcgccaaagtgacaggcggtgcggcctccaagctctctaagatccgagtcgtccggaaatccattgcccgtgttctcacagttattaaccagactcagaaagaaaacctcaggaaattctacaagggcaagaagtacaagcccctggacctgcggcctaagaagacacgtgccatgcgccgccggctcaacaagcacgaggagaacctgaagaccaagaagcagcagcggaaggagcggctgtacccgctgcggaagtacgcggtcaaggcctgaggggcgcattgtcaataaagcacagctggctgag

SEQ ID NO: 690 - DNA, 418 bp, Artificial Sequence
  Description of Artificial sequences:primer
  misc_feature (1)..(418): 3' terminal sequence from clone image:310860. nudix (nucleoside diphosphate linked moiety x)-type motif 5(NUDT5) gene.
  misc_feature (349)..(349): n is a, c, g, or t
  misc_feature (412)..(412): n is a, c, g, or t
tttttttctgttctgtgcttttattttacgaaaaagctaatggcaaatctacattaaactaagttgaatacaaagtcttagtgaagaaggcctggtggtctcgtttacaaaaatggccagtgtcatatttgggcttaaaatttcaagaagggcacttcaaatggctttgcatttgcatgtttcagcgctagagcgtaggaatagaccctggcgtccactgtgagatgttcttcagctaccagagcatcaagtctctgcagcaggtcattcttgggtaaagaaatgacttccacaaactctccatcccctggctttggcttcggctttgcgttttcggcatcatctccgntaatggtgactgtcacgatgtgtatagtacagtttgacaagcctgggtccatacagaccgctngagaac

SEQ ID NO: 691 - DNA, 114 bp, Artificial Sequence
  Description of Artificial sequences:primer
  misc_feature (1)..(114): 5' terminal sequence from clone image:310860. nudix (nucleoside diphosphate linked moiety x)-type motif 5(NUDT5) gene.
agccgtggaccggatcggctgacactgctgcctccagctagttatttcgtcctcttccgttcttcacccctacaccttggaggtgaacttctcacctgagggctgtaaagaaac

SEQ ID NO: 692 - DNA, 1129 bp, Artificial Sequence
  Description of Artificial sequences:primer
  misc_feature (1)..(1129): nudix (nucleoside diphosphate linked moiety x)-type motif 5(NUDT5) gene.
tggcaccggcatcggctgacactgctgcctccagctagttatttcgtcctcttccgttcttcacccctacaccttggaggtgaacttctcacctgagggctgtaaagactcgtttgaaaatggagagccaagaaccaacggaatcttctcagaatggcaaacagtatatcatttcagaggagttaatttcagaaggaaaatgggtcaagcttgaaaaaacaacgtacatggatcctactggtaaaactagaacttgggaatcagtgaacgtaccaaccaggaaagagcagactgcggatggtgtcgcggtcatccccgtgctgcagagaacacttcactatgagtgtatcgttctggtgaaacagttccgaccaccaatggggggctactgcatagagttccctgcaggtctcatagatgatggtgaaaccccagaagcagctgctctccgggagcttgaagaagaaactggctacaaaggggacattgccgaatgttctccagcggtctgtatggacccaggcttgtcaaactgtactatacacatcgtgacagtcaccattaacggagatgatgccgaaaacgcaaggccgaagccaaagccaggggatggagagtttgtggaagtcatttctttacccaagaatgacctgctgcagagacttgatgctctggtagctgaagaacatctcacagtggacgccagggtctattcctacgctctagcgctgaaacatgcaaatgcaaagccatttgaagtgcccttcttgaaattttaagcccaaatatgacactggccatttttgtaaacgagaccaccaggccttcttcactaagactttgtattcaacttagtttaatgtagatttgccattagctttttcgtaaaataaaagcacagaacagatgtggtggtggtatggaattgtaattacaggtaggttgtgaccttcctttaaatttgttataactccagctaaaattaacaaagaatataaatgcaagtatgtttactccaatttttttaaagctcaacagagttaactacagctcagttacttttctagtccagtctggaacacaggggtatttggtattgagaaatagacctgagttctcaattaggtca

SEQ ID NO: 693 - DNA, 362 bp, Artificial Sequence
  Description of Artificial sequences:primer
  misc_feature (1)..(362): 3' terminal sequence from clone image:320143. prefoldin 4(PFDN4) gene.
tttttttttaaacaatattcaagtttattaaacaaataaaaaaagtattataaaatgtttaactttcatcagcttcaaggtttatgttgctcccgaattttgcatacaactgaactttcaaatctgctaacactcgctgaattgattccactctggattctaaggcgtcaatttcttcttgcaaatttttctttgcttcttctaacatttcttgcgtttcttcttgagaatggctaatgaagacatcaccaatttgataaggtatcattaagcaatcatcatctgcaagcatgatgtcatcacaagcatcttctaggttttggagttgtttcttttttacttctatttcttccttcagctct

SEQ ID NO: 694 - DNA, 393 bp, Artificial Sequence
  Description of Artificial sequences:primer
  misc_feature (1)..(393): 5' terminal sequence from clone image:320143. prefoldin 4(PFDN4) gene.
  misc_feature (390)..(390): n is a, c, g, or t
acaaatttgcacggaatacaagtagaatcacagagctgaaggaagaaatagaagtaaaaaagaaacaactccaaaacctagaagatgcttgtgatgacatcatgcttgcagatgatgattgcttaatgataccttatcaaattggtgatgtcttcattagccattctcaagaagaaacgcaagaaatgttagaagaagcaaagaaaaatttgcaagaagaaattgacgccttagaatccagagtggaatcaattcagcgagtgttagcagatttgaaagttcagttgtatgcaaaattccgggagcaacataaaccttgaagctgatgaaagttaaacattttataatactttttttatttgtttaataaacttggaatattgttttaanaaa

SEQ ID NO: 695 - DNA, 1208 bp, Artificial Sequence
  Description of Artificial sequences:primer
  misc_feature (1)..(1208): prefoldin 4(PFDN4) gene.
atggcggccaccatgaagaaggcggctgcagaagatgtcaatgttactttcgaagatcaacaaaagataaacaaatttgcacggaatacaagtagaatcacagagctgaaggaagaaatagaagtaaaaaagaaacaactccaaaacctagaagatgcttgtgatgacatcatgcttgcagatgatgattgcttaatgataccttatcaaattggtgatgtcttcattagccattctcaagaagaaacgcaagaaatgttagaagaagcaaagaaaaatttgcaagaagaaattgacgccttagaatccagagtggaatcaattcagcgagtgttagcagatttgaaagttcagttgtatgcaaaattcgggagcaacataaaccttgaagctgatgaaagttaaacattttataatactttttttatttgtttaataaacttgaatattgtttaaaatgataattttccttcttcaaatgacatggaaagcaaaactttcttttttaaaaattttcatttatttaatggaaacttgcccattttcacatgtctgcttatttattttatatttttaaaagaagacagtattcacctatgtattttgcataacgattatatcaagtctaggggcttcatgtcatgttattaaaatcagttaagcaatcttttatgtttctatattatttagaatatttgttgttgcaattttcacataagaaaatttaacagttgtgtcatgttgtttctgtctgattttaattgctgtctaatgacggggaaagcacgatgaaaagatgtacaatcctgcatccttgcttatttcacaactaaagctttgtcatagacttcaaaatatatatgtatatattttatttaaatatatgttacatattatatttaaacatacatatttaacattttttacatatctatcaatatcagagatttgggtaaaagaatgggtaatgtttaaacatgtggaggcatgtggagctttatacaaacagggcagaaccacagaagaacgttttagaaaccaagagatgtgcagaaagaaatgtttagtgttttttcgttttaaattttagattttattttagtgctttgtaattaattggggtttatattgataaagatgtggaagttaaacagctatgtatgtaaaagtaaggcttatttcttaaataaaggatgcatttcttccca

SEQ ID NO: 696 - DNA, 345 bp, Artificial Sequence
  Description of Artificial sequences:primer
  misc_feature (1)..(345): 3' terminal sequence from clone image:320151. ribosomal protein l37(RPL37) gene.
  misc_feature (283)..(283): n is a, c, g, or t
  misc_feature (287)..(287): n is a, c, g, or t
  misc_feature (297)..(297): n is a, c, g, or t
tttttttattttttaaaaccagaacatttattgcatgactaatcgttgacattcttaagatgaactggatgctgcaacagctgccctcttgggtttaggtgttgttccttcacggaatccatgcctgaatctgcggtatacaatttttaggtgcctcattcgaccagttccggtggtatttcgtcttttagccttggactccagttatactttctcttgcgcttggcagggtagccacatttgccacaggtcgacttctgaaggtggtaggccttagagccanagcngcggcacaangtgtggcgtcttattgcgacgctttccaaacgatgacgttcccttcgt

SEQ ID NO: 697 - DNA, 367 bp, Artificial Sequence
  Description of Artificial sequences:primer
  misc_feature (1)..(367): 5' terminal sequence from clone image:320151. ribosomal protein l37(RPL37) gene.
attcggaacgagggccgcagaagcgagatgacgaagggaacgtcatcgtttggaaagcgtcgcaataagacgcacacgttgtgccgccgctgtggctctaaggcctaccaccttcagaagtcgacctgtggcaaatgtggctaccctgccaagcgcaagagaaagtataactggagtgccaaggctaaaagacgaaataccaccggaactggtcgaatgaggcacctaaaaattgtataccgcagattcaggcatggattccgtgaaggaacaacacctaaacccaagaagggcaagctgttgcaagcatccaagttcatcttaagaatgtcaacgattagtcatgcaataaatgttcttggtttta

SEQ ID NO: 698 - DNA, 371 bp, Artificial Sequence
  Description of Artificial sequences:primer
  misc_feature (1)..(371): ribosomal protein l37(RPL37) gene.
tctttctggtctcggccgcagaagcgagatgacgaagggaacgtcatcgtttggaaagcgtcgcaataagacgcacacgttgtgccgccgctgtggctctaaggcctaccaccttcagaagtcgacctgtggcaaatgtggctaccctgccaagcgcaagagaaagtataactggagtgccaaggctaaaagacgaaataccaccggaactggtcgaatgaggcacctaaaaattgtataccgcagattcaggcatggattccgtgaaggaacaacacctaaacccaagagggcagctgttgcagcatccagttcatcttaagaatgtcaacgattagtcatgcaataaatgttctggttttaaaaaatac

SEQ ID NO: 699 - DNA, 427 bp, Artificial Sequence
  Description of Artificial sequences:primer
  misc_feature (1)..(427): 3' terminal sequence from clone image:320457. sepiapterin reductase (7,8-dihydrobiopterin:nadp+ oxidoreductase)(SPR) gene.
  misc_feature (38)..(38): n is a, c, g, or t
  misc_feature (169)..(169): n is a, c, g, or t
  misc_feature (333)..(333): n is a, c, g, or t
gaaaggacaatctgtattttatttgtatctgcctttgngtcgtatacagacacccaggagccccttctcccagcctgggggaggggtggtagattctgaaggaaggagacatcagagtgaggacacaaagttcaacagaaggtcctgctaccctcagcaaggggcatcnatgtgggctgggacatgtaccgtctgcccttcctcccatccaggccatctgcgaatctacatgggtcctcctattcgacaccagatcactctttcctctacccacaggcttgctatgagcaagagacacaacctcctctcttctgtgttccagcttcttttccnggttcttcccacccccttaagttctattcctggggatagagacaccaatacccataacctctttcctaagcctccttataaccagggtggaaag

SEQ ID NO: 700 - DNA, 432 bp, Artificial Sequence
  Description of Artificial sequences:primer
  misc_feature (1)..(432): 5' terminal sequence from clone image:320457. sepiapterin reductase (7,8-dihydrobiopterin:nadp+ oxidoreductase)(SPR) gene.
  misc_feature (336)..(336): n is a, c, g, or t
attgcgaaaagggctgcaggagctgaaggaaaggggaagctggtggattgcaaggtgtcagcccagaaactgctgagcttactggaaaaggacgagttcaagtctggagcccacgtggacttctatgacaaataagcccatgtttttggcttcctgaacctttttgcccccacttttagacataccccagagccctgtggctccccacaccctgccataggggcagtcctgccttacacatagaagcattcatgcctgctgccctgccctcaggacagccagctgtgagctcccaggtcattggccttaccagttgtcaggagtctgtgctgtgcncctcgggttataaggaggcttaggagagaggttatgggtattggtgtctctatccccaggaatagaacttaaggggtgggaagaacaggaaaagaa

SEQ ID NO: 701 - DNA, 1447 bp, Artificial Sequence
  Description of Artificial sequences:primer
  misc_feature (1)..(1447): sepiapterin reductase (7,8-dihydrobiopterin:nadp+ oxidoreductase)(SPR) gene.
ggcacgaggcggagaacaggagcatggagggcgggctggggcgtgctgtgtgcttgctgaccggggcctcccgcggcttcggccggacgctggccccgctcctggcctcgctgctgtcgcccggctccgtgcttgtccttagcgcccgcaacgacgaggcactgcgccagctggaggccgagctgggcgccgagcggtctggcctgcgcgtggtgcgggtgcccgccgacctgggcgccgaggccggcttgcagcagctgctcggcgccctgcgcgagctcccccggcccaaggggctgcagcgactgctgcttatcaacaacgcgggctctcttggggatgtgtccaaaggcttcgtggacctgagtgactccactcaagtgaacaactactgggcactgaacttgacctccatgctctgcctgacttccagcgtcctgaaggccttcccggacagtcctggcctcaacagaaccgtggttaacatctcgtccctctgtgccctgcaacctttcaaaggctgggcgctgtactgtgcaggaaaggctgctcgtgatatgctgttccaggtcctggcgctggaggaacctaatgtgagggtgctgaactatgccccaggtcctctggacacagacatgcagcagttggcccgggagacctccgtggacccagacatgcgaaaagggctgcaggagctgaaggcaaaggggaagctggtggattgcaaggtgtcagcccagaaactgctgagcttactggaaaaggacgagttcaagtctggagcccacgtggacttctatgacaaataagcccatgtttttggcttcctgaacctttttgcccccacttttagacataccccagagccctgtggctccccacaccctgccataggggcagtcctgccttacacatagaagcattcatgcctgctgccctgccctcaggcacagccagctgtgagctcccaggtcattggccttaccagttgtcaggagtctgtgctgtgcaccctgggttataaggaggcttaggagagaggttatgggtattggtgtctctatccccaggaatagaacttaaggggtgggaagaacaggaaaagaagctggaacacagaagagaggaggttgtgtctcttgctcatagcaagcctgtgggtagaggaaagagtgatctggtgtcgaataggaggacccatgtagattcgcagatggcctggatgggaggaagggcagacggtacatgtcccagcccacatagatgccccttgctgagggtagcaggaccttctgttgaactttgtgtcctcactctgatgtctccttccttcagaatctaccacccctcccccaggctgggagaaggggctcctgggtgtctgtatacacgccaaaggcagatacaaataaaatacagattgtcctttaaaaaaaaaaaaaaaaaa

SEQ ID NO: 702 - DNA, 203 bp, Artificial Sequence
  Description of Artificial sequences:primer
  misc_feature (1)..(203): 3' terminal sequence from clone image:320775. hypothetical protein 669(LOC56267) gene.
aaagtcagatgagtgtttattgtttgccaggctttttgcatacattagtccatttaattctcagaaacgaccttcatatgaaacaggtactgattttattcctattttataatgagagaaccgagttactgagaggttaaacatctcacatttcttatccactatgttatgctgactcttataaaatgattgtggaaggtgtg

SEQ ID NO: 703 - DNA, 426 bp, Artificial Sequence
  Description of Artificial sequences:primer
  misc_feature (1)..(426): 5' terminal sequence from clone image:320775. hypothetical protein 669(LOC56267) gene.
  misc_feature (43)..(43): n is a, c, g, or t
  misc_feature (177)..(177): n is a, c, g, or t
  misc_feature (181)..(181): n is a, c, g, or t
  misc_feature (186)..(186): n is a, c, g, or t
  misc_feature (216)..(216): n is a, c, g, or t
  misc_feature (230)..(230): n is a, c, g, or t
  misc_feature (315)..(315): n is a, c, g, or t
  misc_feature (328)..(328): n is a, c, g, or t
  misc_feature (364)..(364): n is a, c, g, or t
  misc_feature (393)..(393): n is a, c, g, or t
tagagatcctggcctacccctccgccaaagcgcgcactgagtnaaaccccagagtcaatccctgtcccggctccgcccccgcgtccgaatcccgcccagccgtccctcaagcccagtcgggactcgagcctagggaggcgaggttcccgcaccggatagaaaatgtcactgaaattnacantttgnaaatgcaaaacggattgaaggacttgatantaatgtgtggattnaatttaccaaattggctgcagacccttctgttgtgaatcttggccaagggctttccagatatatcccctcctacatatgtaaaangaagaattatcanagaattgcagcaatccgatagcctgaatcagtatanacgagggcttttggccatccatcacttgntgaaagctctgtcctatctgtatgaaaagcttt

SEQ ID NO: 704 - DNA, 3678 bp, Artificial Sequence
  Description of Artificial sequences:primer
  misc_feature (1)..(3678): hypothetical protein 669(LOC56267) gene.
cgagcctagggaggcgaggttcccgcaccggataggaacattctgttgttttcctctgccatctagtggcaaaagaaagtaattttcctggttttttgaatggatagccataccttaaaaagcatccagattgcgcagtagtgctagcggcttcgcggttcagtcctcctaactgacagccgccactggtgctgagctgctaggaagcccctgtcggcgagcttgttggagcttgaacccactgtcacccctccgactcaccggcaaaaaaaaaaatggttgaagcagatcgcccaggaaagctcttcattggtgggcttaatacggaaacaaatgagaaagctcttgaaacagtatttggcaaatatggacgaatagtggaagtactcttgataaaagaccgtgaaaccaacaaatcaagaggatttgcttttgtcacctttgaaagcccagcagacgctaaggatgcagccagagacatgaatggaaagtcattagatggaaaagccatcaaggtggaacaagccaccaaaccatcatttgaaagaggtagacatggaccgcccccacctccaagaagtagaggtcctccaagaggttttggagctggaagaggaggaagtggaggaaccaggggacctccttcacgaggaggacacatggatgatggtggatattccatgaattttaacatgagttcttccaggggaccactcccagtaaaaagaggaccaccaccaagaagtgggggtccttctcctaagagatctgcaccttcaggactagttcgcagcagcagtggaatgggaggaagagctcctctatcacgtggaagagatagttatggaggtccacctcgaagggaaccgctcccctctcgtagagatgtttatttgtccccaagagatgatgggtattctactaaagacagctattcaagcagagattacccaagttctcgtgatacaagagattatgcaccaccaccacgagattatacttaccgtgattatggtcattccagttcacgtgatgactatccatcaagaggctatggcgatagagatggatatggtcgtgatcgtgactattcagatcatccaagtggaggttcctacagagattcatatgagagttatggtaactcacgtagtgctccacttacacgagggcccccgccatcttatggtggaagcagtcgctatgatgattatagcagctcacgtgatggatatggtggaagtcgagacagttactcaagcagccgaagtgatctctactcaagttgtgacagggttggcagacaagaaagagggcttcccccttctgtagaaagggggtacccttcttcacgtgattcctacagcagttcaagccgcggagcaccaagaggtgctggccctggaggaagccgatctgatagagggggaggcagaagcagatactagaaacaaacaaaactttggaccaaaatcccagttcaaagaaacaaaaaaaagagtggaaactattctatcataactacccaaggactactaaaaggaaaaattgtgttaccttttttaaattccctgttaagtcccttccgtaatttttatgttcttgtgaggaaaaaagtaaaacatgtttaattttatttgactttatgacattgcttttcaacaagcaaatgttaaatgtgttaagccttgtagtactagtgttgtaactttccaagtaaaggtgtccctaaagaccacttcctatctggtttttcccagtaaatgaggcaagcaattctaagatcttccacaaaacatctagccatctaaaatggagagatgaatcattctgcctatacaaacaagctagctattagagggtggttggagtatgctactcataagatttcagggtgttttctaactgaaatctcactgttctcagtatgcaaaacctgaaatcagatgcctatgtaaggaaagtgctattcacccagtaaacccaaaaaaagcaaatggataatgctggccattttgcctttctgacatttccttgggaatctgcaagaacctcccctttcccctcccacaataagaccatttaagtgtgtgctaaacaactacggaatactaaataaaaagtttggccaaaaccaaccatgaagctgcaaaggtgcttgctcttactctttcaaatttttgcaactctaatgtctcacttttaaaggaacagcttgattgcaaaggagaaaatagataagcaatgaatttatctccaacttcctaaaggcttatgacttctaaaaagtgaatctatcagcattccacatcagatttaaagcatcaaatgcctgtgaaacagcaaagatggttgaagattgtgctcattatgtttgtggagtgctgattgattcacagtagataacgctggcagtaagagaaatcaaatgctaagagttgttgaagcagaaggcggctgattgttggtaagtcagtgcagttgcataagcagtgctgtcagaattggtttggtgcaggcaatagattttgccttcaagggttcctgtggatctcaggaaggcatcagtgttgattaacactcataactagggagtgagtggtagttacttaagtaattgaccaaatggaaaaggggaagtaattaaggaaattggtaagtggaggtagtcaggaggttctcgtggtcctttacacagattttacagctttgggtttcattttgtttagctaaagtcatggggacaactcttcaatttagaacttaagatgaattataaaaatgatggatataagtggtagctctatctggtgaagtgtcttgtcagtaagtgaaacatttttttgtggtggcttatccacaaacagtttagttgtagaataaaacttatgagtgacatctggaaagtaacaaccatgctaagatggcaaacacactggaaacaattgggccacttggctttcttttgctgtattgttttataagcctgctttacctccccgtcttggaaacaagttttagtttattgctttggagactagagccaatagtgtaatgttctcaaaggaaacagacttgagttgttggattagaggaactaactcaacttctaattttttttgttgtaattatggcactgtcatgttttaacatttgcaactagggatagtaagtacaacatttttaactctcatttggcagactactactaatcacagaccacaagggtaatgaccaaatttatgtggttgttacacttccatagttgtcttagccgaatccttccatattcttatgattacttgggttaaagcttctgtgaggaccttttggctcttaagatatcctaaatatttaaaatatttagatatcctaaatataggatatagagtttgtaccaaatatgaatgaatattgttcaaagcaaggagtatgttaaaatgaccagacacctgtttgataaatagtttactgaactagcagacgtgtggaaaaagaatcagatcttgattcttctgggtttatactggttgtaaaacagaatgatattagaaaatgttttccttgtttaagtggtagttgaacatagaacttgggtattatagatcacttttcactttttggaatgttttgtattgaaacttaatacaactttaacatggcaaaaaaaaaaaaaaa

SEQ ID NO: 705 - DNA, 582 bp, Artificial Sequence
  Description of Artificial sequences:primer
  misc_feature (1)..(582): 3' terminal sequence from clone image:321259. ribosomal protein l31(RPL31) gene.
  misc_feature (476)..(476): n is a, c, g, or t
  misc_feature (555)..(555): n is a, c, g, or t
  misc_feature (565)..(565): n is a, c, g, or t
tttttttgaaggcaattttataactttatttgatctgacgatcagcgattagttctcatccacattgactgtctgtagatctgtaaaggaagtaacagtcaatttccatacccacatcacatttcatatttcaactctaaaaaccttttcgtagacgggtctggacattctattttccacaacctttttacatcccagatatggatcagttttgcattctttagcatcttcccacaccaacaatttaaaaagggtacaatgacgtgtgtcacccctagcttaacagatgaattcacattttaagaggtaaggacatttttctaatgaatttaaatggctttatgggatggagaacttacttttgaaagtggtaacaggtacataggtaaccaaagtatatagcttatttggtgaatcttcatcctcattacgttttctggacagccgcacacggattccggtatgggcacattccntattcccttggcccagacagctttgttgagccgggtgtcaatgcgcacatctggagttcccatctccttcatggcaaanttccggatcnccttgagtgcccggggg

SEQ ID NO: 706 - DNA, 603 bp, Artificial Sequence
  Description of Artificial sequences:primer
  misc_feature (1)..(603): 5' terminal sequence from clone image:321259. ribosomal protein l31(RPL31) gene.
  misc_feature (67)..(67): n is a, c, g, or t
  misc_feature (69)..(69): n is a, c, g, or t
  misc_feature (557)..(557): n is a, c, g, or t
gctgcagaatggctcccgcaaagaagggtggcgagaagaaaaagggccgttctgccatcaacgaagngntaacccgagaatacaccatcaacattcacaagcgcatccatggagtgggcttcaagaagcgtgcacctcgggcactcaaagagattcggaaatttgccatgaaggagatgggaactccagatgtgcgcattgacaccaggctcaacaaagctgtctgggccaaaggaataaggaatgtgccataccgaatccgtgtgcggctgtccacgaaaacgtaatgaggatgaagattcaccaaataagctatatactttggttacctatgtacctgttaccactttcaaaagtaagttctccatcccataaagccatttaaattcattagaaaaatgtccttacctcttaaaatgtgaattcatctgttaagctaggggtgacacacgtcattgtaccctttttaaattgttggtgtgggaagatgctaaagaatgcaaaactgatccatatctgggatgtaaaaaggttgtgggaaaatagaatgtccagancccgtctacaaaagggttttagagttggaatatgaatgtgatgtgg

SEQ ID NO: 707 - DNA, 442 bp, Artificial Sequence
  Description of Artificial sequences:primer
  misc_feature (1)..(442): ribosomal protein l31(RPL31) gene.
cttcctttccaacttggacgctgcagaatggctcccgcaaagaagggtggcgagaagaaaaagggccgttctgccatcaacgaagtggtaacccgagaatacaccatcaacattcacaagcgcatccatggagtgggcttcaagaagcgtgcacctcgggcactcaaagagattcggaaatttgccatgaaggagatgggaactccagatgtgcgcattgacaccaggctcaacaaagctgtctgggccaaaggaataaggaatgtgccataccgaatccgtgtgcggctgtccagaaaacgtaatgaggatgaagattcaccaaataagctatatactttggttacctatgtacctgttaccactttcaaaaatctacagacagtcaatgtggatgagaactaatcgctgatcgtcagatcaaataaagttataaaattgc

SEQ ID NO: 708 - DNA, 376 bp, Artificial Sequence
  Description of Artificial sequences:primer
  misc_feature (1)..(376): 3' terminal sequence from clone image:321510. signal recognition particle 72kda(SRP72) gene.
  misc_feature (283)..(283): n is a, c, g, or t
  misc_feature (343)..(343): n is a, c, g, or t
aatgggccaaacagacctgttagattttaatactgcctggtatgcaactcagatactgatttcttctctatggaggaagccaatgttcatgttcttgataacagtcattaatctttctgattgagacagtccaaacccatcgtcgacctcagaacactgggtctaagagtgaacttcttacattgatatattttccttgagttctttcatggtgctgtatcagcatgctaccataatctgaaaatgacatggggcacaaaggagccatatatatatatttcangtttatatatatatatatatcgtatatatatatacatatatatatatatataaacatggnaaagtatcccagatgccagggatcacatgacag

SEQ ID NO: 709 - DNA, 439 bp, Artificial Sequence
  Description of Artificial sequences:primer
  misc_feature (1)..(439): 5' terminal sequence from clone image:321510. signal recognition particle 72kda(SRP72) gene.
  misc_feature (328)..(328): n is a, c, g, or t
  misc_feature (395)..(395): n is a, c, g, or t
  misc_feature (435)..(435): n is a, c, g, or t
gctacatacattcggaagaagggtggaaaagttactggagatagtcaaccaaaggaacaaggacagggagatttgaaaaagaagaaaaagaaaaagaagggaaaattgcctaagaattatgacccaaaagttaccccagatccagaaagatggctgccaatgcgagaacgttcttactaccggggaagaaagaagggtaaaaagaaggatcagattggaaaagggacccagggagcaactgcaggagcttcatctgaactggatgccagtaaaactgtgagcagcccacccacctccccaagacctggcagtgctgcaacagtatctncctctacaagtaacatcatacccccaagacaccagaaacctgcagggggctccaagcaacaaaaaangaaacaggcaacaggaaaaagaagaaaggtggaaaaggtngctt

SEQ ID NO: 710 - DNA, 2016 bp, Artificial Sequence
  Description of Artificial sequences:primer
  misc_feature (1)..(2016): signal recognition particle 72kda(SRP72) gene.
atggcgagcggcggcagcgggggggtgtcagtacctgcgctgtggagtgaagtgaaccggtatggccagaacggcgacttcacgcgcgctctcaagaccgtcaataagatactacagatcaacaaagatgacgtaactgccctgcattgtaaagtggtatgccttatccagaatggaagtttcaaggaagctttgaatgtcatcaatactcacaccaaagtgttagccaataactctctctcctttgaaaaggcatattgcgagtacaggctgaacagaattgagaatgccttgaagacaatagaaagtgccaaccagcagacagacaaactgaaggagctttatggacaagtgttataccgtttggaacgctatgatgaatgcttagcagtgtatagagatctcgtccgaaactcccaagatgattatgatgaggagaggaaaacaaacctttcagcagttgttgcagctcaaagcaattgggaaaaagtggttccagagaacctgggcctccaagaaggcacacatgagctgtgctacaacactgcatgtgcactgataggccaaggccagctgaaccaggccatgaaaatcctacaaaaagctgaagatctttgccgccgttcattatcagaagacactgatgggactgaggaagacccacaggcagaactggccatcattcatggtcagatggcttatatcctgcagcttcagggtcgaacagaggaggctttgcaactttacaatcaaataataaaactaaaaccaacagatgtgggattactagctgtaattgcaaataacatcattaccattaacaaggaccaaaatgtctttgactccaagaagaaagtgaaattaaccaatgcggaaggagtagagtttaagctttccaagaaacaactacaagctatagaatttaacaaagctttacttgctatgtacacaaaccaggctgaacaatgccgcaaaatatctgccagtttacagtcccaaagtcccgagcatctcttacctgtgttaatccaagctgcccagctctgccgtgaaaagcagcacacaaaagcaatagagctgcttcaggaattttcagatcagcatccagaaaatgcagctgaaattaagctgaccatggcacagttgaaaatttctcaaggtaatatttctaaagcatgtctaatattgagaagcatagaggagttaaagcataaaccaggcatggtatctgcattagttaccatgtatagccatgaagaagatattgatagtgccattgaggtcttcacacaagctatccagtggtatcaaaaccatcagccaaaatctcctgctcatttgtccttgataagagaagctgcaaacttcaaactcaaatatgggcggaagaaggaggcaattagtgacctacaacagctgtggaaacaaaatccaaaagatattcacaccctggcacagcttatttctgcttactcacttgtagatccagagaaagccaaagctcttagtaaacacttgccatcgtcagatagtatgtctctaaaagtagatgttgaggctcttgaaaattctgctggtgctacatacattcggaagaagggtggaaaagttactggagatagtcaaccaaaggaacaaggacagggagatttgaaaaagaagaaaaagaaaaagaagggaaaattgcctaagaattatgacccaaaagttaccccagatccagaaagatggctgccaatgcgagaacgttcttactaccggggaagaaagaagggtaaaaagaaggatcagattggaaaagggacccagggagcaactgcaggagcttcatctgaactggatgccagtaaaactgtgagcagcccacccacctccccaagacctggcagtgctgcaacagtatctgcctctacaagtaacatcatacccccaagacaccagaaacctgcaggggctccagcaacaaaaaagaaacagcaacagaaaaagaagaaaggtggaaaaggtggctggtga

SEQ ID NO: 711 - DNA, 345 bp, Artificial Sequence
  Description of Artificial sequences:primer
  misc_feature (1)..(345): 3' terminal sequence from clone image:321733. ribosomal protein s6(RPS6) gene.
  misc_feature (194)..(194): n is a, c, g, or t
  misc_feature (235)..(235): n is a, c, g, or t
  misc_feature (259)..(259): n is a, c, g, or t
  misc_feature (275)..(275): n is a, c, g, or t
  misc_feature (278)..(278): n is a, c, g, or t
  misc_feature (288)..(288): n is a, c, g, or t
  misc_feature (301)..(301): n is a, c, g, or t
  misc_feature (330)..(330): n is a, c, g, or t
tttttttttttcagagtctgatcttatttatttgttactcaaaaaatcttatttctgactggattcagacttagaagtagaagctcgcagagaggaaagtctgcgtctcttcgcaatttgttcctggcgcttctccttagcctccttcattctcttggccaaaagtttagcatattctgcagcctcttctttanttttcttggtacgctgcttcttcagagcaatacgccggccnttgtgctggaggacacgtggaagnacaaagacgctgaaanctngggtgccttnggtccaagggttnctaaccttcctttaatttaaagggctttncttacaacatactgg

SEQ ID NO: 712 - DNA, 443 bp, Artificial Sequence
  Description of Artificial sequences:primer
  misc_feature (1)..(443): 5' terminal sequence from clone image:321733. ribosomal protein s6(RPS6) gene.
  misc_feature (16)..(16): n is a, c, g, or t
  misc_feature (327)..(327): n is a, c, g, or t
gctcggaggcgttcantgcttcaagatgaagctgaacatctccttcccccactggctgccagaaactcattgaagtggacgatgaacgcaaacttcgtactttctatgagaagcgtatggccacagaagttgctgctgacgctctgggtgaagaatggaagggttatgtggtccgaatcagtggtgggaacgacaaacaaggtttccccatgaagcagggtgtcttgacccatggccgtgtccgcctgctactgagtaaggggcattcctgttacagaccaaggagaactggagaaagaaagagaaaatcagttcgtggttgcattngtggatgcaaatctgagccgttctcaacttggttattgtaaaaaaaggagagaaggatattcctggacttgactgatactacagtgcctcgccgcctgggccccaaaagagctagc

SEQ ID NO: 713 - DNA, 829 bp, Artificial Sequence
  Description of Artificial sequences:primer
  misc_feature (1)..(829): ribosomal protein s6(RPS6) gene.
cctcttttccgtggcgcctcggaggcgttcagctgcttcaagatgaagctgaacatctccttcccagccactggctgccagaaactcattgaagtggacgatgaacgcaaacttcgtactttctatgagaagcgtatggccacagaagttgctgctgacgctctgggtgaagaatggaagggttatgtggtccgaatcagtggtgggaacgacaaacaaggtttccccatgaagcagggtgtcttgacccatggccgtgtccgcctgctactgagtaaggggcattcctgttacagaccaaggagaactggagaaagaaagagaaaatcagttcgtggttgcattgtggatgcaaatctgagcgttctcaacttggttattgtaaaaaaaggagagaaggatattcctggactgactgatactacagtgcctcgccgcctgggccccaaaagagctagcagaatccgcaaacttttcaatctctctaaagaagatgatgtccgccagtatgttgtaagaaagcccttaaataaagaaggtaagaaacctaggaccaaagcacccaagattcagcgtcttgttactccacgtgtcctgcagcacaaacggcggcgtattgctctgaagaagcagcgtaccaagaaaaataaagaagaggctgcagaatatgctaaacttttggccaagagaatgaaggaggctaaggagaagcgccaggaacaaattgcgaagagacgcagactttcctctctgcgagcttctacttctaagtctgaatccagtcagaaataagattttttgagtaacaaataaataagatcagactctg

SEQ ID NO: 714 - DNA, 458 bp, Artificial Sequence
  Description of Artificial sequences:primer
  misc_feature (1)..(458): 3' terminal sequence from clone image:321783. phosphorylase kinase, gamma 1 (muscle)(PHKG1) gene.
  misc_feature (294)..(294): n is a, c, g, or t
  misc_feature (344)..(344): n is a, c, g, or t
  misc_feature (374)..(374): n is a, c, g, or t
  misc_feature (395)..(395): n is a, c, g, or t
ttttttttttttggaagaaaatgactttattctaattaactcacaaagaataaaatcataacataacagctagtttaaggaggccacacaaacatttgcccagtcccagattctacagagtagggacacccccacttccatttcaattctgaagcaaggaagctaggaatgacaggagaggtttaactgatggttacactttataccctcactatcaattctatttttatactaaattaacttagttatgagagctgattttccatctctccaggttgaacttcttcattaggncaatcccgtttggcaagtccggaactggtttcaggaacctcattggaaanccctccacagaagccttggatggtcaaccngggtttctgggggcacaactnccagaaaactggtttggattctcataagagggcaaaggctggctggctggctgtgctgggctg

SEQ ID NO: 715 - DNA, 453 bp, Artificial Sequence
  Description of Artificial sequences:primer
  misc_feature (1)..(453): 5' terminal sequence from clone image:321783. phosphorylase kinase, gamma 1 (muscle)(PHKG1) gene.
  misc_feature (7)..(7): n is a, c, g, or t
  misc_feature (347)..(347): n is a, c, g, or t
cgcttantcttcggtggttgtcacacgtccggagcctagccgtcgcgtacctaggatgccgcgtggaagccgaagccgcacctcccgcatggcccctccggccagccggcccctcagatgagagctgcacccaggccagcaccagtcgctcagccaccagcagcggcacccccatctgcagttggctcttctgctgctgcgccccggcagccaggtctgatggcccagatggcaaccactgcagctggcgtggctgtgggctctgctgtggggcacacattgggtcacgccattactgggggcttcagtggaggaagtaatgctgagcctgcaaggcctgacatcanttaccaaggagcctcagggaaacccagccagcacatgcagcagcagcctttgcctctaatgagatcaaacagtttctgggagtgtgcccagaaccagggtgacatc

SEQ ID NO: 716 - DNA, 1432 bp, Artificial Sequence
  Description of Artificial sequences:primer
  misc_feature (1)..(1432): phosphorylase kinase, gamma 1 (muscle)(PHKG1) gene.
gaggaaaattcttccagcgatggtctcccactcagagctgaggaagcttttctactcagcagatgctgtgtgttttgatgttgacagcacggtcatcagagaagaaggaatcgatgagctagccaaaatctgtggcgttgaggacgcggtgtcagaaatgacacggcgagccatgggcggggcagtgcctttcaaagctgctctcacagagcgcttagccctcatccagccctccagggagcaggtgcagagactcatagcagagcaacccccacacctgacccccggcataagggagctggtaagtcgcctacaggagcgaaatgttcaggttttcctaatatctggtggctttaggagtattgtagagcatgttgcttcaaagctcaatatcccagcaaccaatgtatttgccaataggctgaaattctactttaacggtgaatatgcaggttttgatgagacgcagccaacagctgaatctggtggaaaaggaaaagtgattaaacttttaaaggaaaaatttcattttaagaaaataatcatgattggagatggtgccacagatatggaagcctgtcctcctgctgatgctttcattggatttggaggaaatgtgatcaggcaacaagtcaaggataacgccaaatggtatatcactgattttgtagagctgctgggagaactggaagaataacatccattgtcgtacagctccaaacaacttcagatgaatttttacaagttatacagattgatactgtttgcttacagttgcctattacaacttgctatagaaagttggtacaaatgatctgtactttaaactacagttaggaatcctagaagattgctttttttttttttttaactgtagttccagtattatatgatgactattgatttcctggagaggttttttttttttttgagacagaatcttgctctgttgcccaggctggagtgcagtggcgcggtctcggctcactgcaagctctgcctcccaggttcacgccattctcctgcctcagcctcccgagtagctgggactacaggcacccgccaccacatccggctaattttttgtatttttagtagagacggggtttgaccgtgttagccaggatggtcttgatctcctgaccttgtgatccgcctgcctcagcctcccaaagtgctgggattacaggcttgggccaccgcgcccagccaatgtcctagagagttttgtgatctgaattctttatgtatatttgtagctatatttcatacaaagtgctttaagtgtggagagtcaattaaacacctttactcttagaaatacggattcggcagccttcagtgaatattggtttctctttggtatgtcaataaaagtttatccgtatgtcagaacggatttgtggaaaaaaaaaaaaaaaaaaaaaaaaaa

SEQ ID NO: 717 - DNA, 374 bp, Artificial Sequence
  Description of Artificial sequences:primer
  misc_feature (1)..(374): 3' terminal sequence from clone image:321907. tumor-associated calcium signal transducer 1(TACSTD1) gene.
cagtttaaaatgttttatttcatagctcataaaaaagtatgtatgtacaagactcaagtaaatagaaaggcagctttcaatcacaaatcagtttttcagattttactgtggaagcatatttaatgcacacatttgaatgttacacataaataattttaacgatggagtccaagttctggattttacattagatctgcatatataagacacttgtggtcaaatttcaagattggtaaagccagtttcaagctgcttatattttgagtacaggtttcactattacaaatatatgatgttaaactaacaaactcatcgaccttcaaagatgtcttcgtcccacgcacacacatttgtaatttgtgtccatttggcta

SEQ ID NO: 718 - DNA, 408 bp, Artificial Sequence
  Description of Artificial sequences:primer
  misc_feature (1)..(408): 5' terminal sequence from clone image:321907. tumor-associated calcium signal transducer 1(TACSTD1) gene.
atgttatcactattgatctggttcaaaattcttctcaaaaaactcagaatgatgtggacatagctgatgtggcttattattttgaaaaagatgttaaaggtgaatccttgtttcattctaagaaaatggacctgacagtaaatggggaacaactggatctggatcctggtcaaactttaatttattatgttgatgaaaaagcacctgaattctcaatgcagggtctaaaagctggtgttattgctgttattgtggttgtggtgatagcagttgttgctggaattgttgtgctggttatttccagaaagaagagaatggcaaagtatgagaaggctgagataaaggagatgggtgagatgcatagggaactcaatgcataactatataatttgaagattatagaagaag

SEQ ID NO: 719 - DNA, 1528 bp, Artificial Sequence
  Description of Artificial sequences:primer
  misc_feature (1)..(1528): tumor-associated calcium signal transducer 1(TACSTD1) gene.
cggcgagcgagcaccttcgacgcggtccggggaccccctcgtcgctgtcctcccgacgcggacccgcgtgccccaggcctcgcgctgcccggccggctcctcgtgtcccactcccggcgcacgccctcccgcgagtcccgggcccctcccgcgcccctcttctcggcgcgcgcgcagcatggcgcccccgcaggtcctcgcgttcgggcttctgcttgccgcggcgacggcgacttttgccgcagctcaggaagaatgtgtctgtgaaaactacaagctggccgtaaactgctttgtgaataataatcgtcaatgccagtgtacttcagttggtgcacaaaatactgtcatttgctcaaagctggctgccaaatgtttggtgatgaaggcagaaatgaatggctcaaaacttgggagaagagcaaaacctgaaggggccctccagaacaatgatgggctttatgatcctgactgcgatgagagcgggctctttaaggccaagcagtgcaacggcacctccacgtgctggtgtgtgaacactgctggggtcagaagaacagacaaggacactgaaataacctgctctgagcgagtgagaacctactggatcatcattgaactaaaacacaaagcaagagaaaaaccttatgatagtaaaagtttgcggactgcacttcagaaggagatcacaacgcgttatcaactggatccaaaatttatcacgagtattttgtatgagaataatgttatcactattgatctggttcaaaattcttctcaaaaaactcagaatgatgtggacatagctgatgtggcttattattttgaaaaagatgttaaaggtgaatccttgtttcattctaagaaaatggacctgacagtaaatggggaacaactggatctggatcctggtcaaactttaatttattatgttgatgaaaaagcacctgaattctcaatgcagggtctaaaagctggtgttattgctgttattgtggttgtggtgatagcagttgttgctggaattgttgtgctggttatttccagaaagaagagaatggcaaagtatgagaaggctgagataaaggagatgggtgagatgcatagggaactcaatgcataactatataatttgaagattatagaagaagggaaatagcaaatggacacaaattacaaatgtgtgtgcgtgggacgaagacatctttgaaggtcatgagtttgttagtttaacatcatatatttgtaatagtgaaacctgtactcaaaatataagcagcttgaaactggctttaccaatcttgaaatttgaccacaagtgtcttatatatgcagatctaatgtaaaatccagaacttggactccatcgttaaaattatttatgtgtaacattcaaatgtgtgcattaaatatgcttccacagtaaaatctgaaaaactgatttgtgattgaaagctgcctttctatttacttgagtcttgtacatacatacttttttatgagctatgaaataaaacattttaaactg

SEQ ID NO: 720 - DNA, 303 bp, Artificial Sequence
  Description of Artificial sequences:primer
  misc_feature (1)..(303): 3' terminal sequence from clone image:321973. ribosomal protein s27-like(RPS27L) gene.
  misc_feature (28)..(28): n is a, c, g, or t
  misc_feature (66)..(66): n is a, c, g, or t
  misc_feature (73)..(73): n is a, c, g, or t
  misc_feature (80)..(80): n is a, c, g, or t
  misc_feature (133)..(133): n is a, c, g, or t
  misc_feature (157)..(157): n is a, c, g, or t
  misc_feature (203)..(203): n is a, c, g, or t
  misc_feature (216)..(216): n is a, c, g, or t
  misc_feature (220)..(220): n is a, c, g, or t
  misc_feature (225)..(225): n is a, c, g, or t
  misc_feature (234)..(234): n is a, c, g, or t
  misc_feature (250)..(250): n is a, c, g, or t
  misc_feature (253)..(253): n is a, c, g, or t
  misc_feature (274)..(274): n is a, c, g, or t
ttttttttttttttttttttttgcccanaatcaaaactttattgaaaaactgacaccaaaataggngattacngctgtanaccttacaaaaccaaatgtaattacattatcttggtaaattaattagaattanggaatttatgataaggctttctgngagacaacacaaaattaaaattcaggaagctgtttgaatcattagngttgctttcttcnaaangaacncccttctgngagtctggcctttccnccngtaggctggcacaacactgtngaacaacctacacaaagaaccactgtctg

SEQ ID NO: 721 - DNA, 102 bp, Artificial Sequence
  Description of Artificial sequences:primer
  misc_feature (1)..(102): 5' terminal sequence from clone image:321973. ribosomal protein s27-like(RPS27L) gene.
  misc_feature (68)..(68): n is a, c, g, or t
gcttgctagctgtgtgggctgggaggtctggtagggctgagcttgcaagaggatcaacatgcctttgntacgagatttactacatccgtccttggaagagga

SEQ ID NO: 722 - DNA, 523 bp, Artificial Sequence
  Description of Artificial sequences:primer
  misc_feature (1)..(523): ribosomal protein s27-like(RPS27L) gene.
gcagatcgcttgcagcttgctagctgtgtgggctgggaggtctggtagggctgagcttgcaagaggatcaacatgcctttggctagagatttactacatccgtccttggaagaggaaaagaaaaaacataaaaagaaacgcctagtacaaagtccaaattcttactttatggatgtaaaatgtccaggttgctacaagatcaccacggttttcagccatgctcagacagtggttctttgtgtaggttgttcaacagtgttgtgccagcctacaggaggaaaggccagactcacagaagggtgttcatttagaagaaagcaacactaatgattcaaacagcttcctgaattttaattttgtgttgtctcacagaaagccttatcataaattccataattctaattaatttaccaagataatgtaattacatttggttttgtaaggtatacagcagtaatctcctattttggtgtcagtttttcaataaagttttgattatgggcaaaaaaaaaaaaaaaaaaaa

SEQ ID NO: 723 - DNA, 549 bp, Artificial Sequence
  Description of Artificial sequences:primer
  misc_feature (1)..(549): 3' terminal sequence from clone image:321981. loc151103.
  misc_feature (332)..(332): n is a, c, g, or t
  misc_feature (376)..(376): n is a, c, g, or t
  misc_feature (400)..(400): n is a, c, g, or t
  misc_feature (466)..(466): n is a, c, g, or t
  misc_feature (489)..(489): n is a, c, g, or t
  misc_feature (499)..(499): n is a, c, g, or t
  misc_feature (521)..(521): n is a, c, g, or t
  misc_feature (539)..(539): n is a, c, g, or t
tttttttacctttttttcccaaaaattttattgggggaaaactacaaaacatttacagtacaatgtttacagtcacaatttgtagtgagctgattccccaaaatatattacaactcaagttgacttatcttgttacattcaaaaacctacttctgtccaaagtagtccagagagtacatatagtgctccaactgtacctacgtacaaactaaagctaccgctcattcatctgctgtccaggaaagcttaggagacattcctgcctttctacatggaaaaaaaaatagtacaagttttggaattttccggaattaaacaaggcatattcatgnactacatatttcagcactaaggcggttgctttcactttatatcnatataaaaaaagtggtaaaaatcntttccctttgtggcagttgaacccatcctacattcagattctctcaagcactaataaaatacctanttgggtgagggagattttaggcnagttcggggnccttcccaaagggcactgtggngactcccccccccaattncccgggtatt

SEQ ID NO: 724 - DNA, 571 bp, Artificial Sequence
  Description of Artificial sequences:primer
  misc_feature (1)..(571): 5' terminal sequence from clone image:321981. loc151103.
  misc_feature (28)..(28): n is a, c, g, or t
  misc_feature (34)..(34): n is a, c, g, or t
  misc_feature (366)..(366): n is a, c, g, or t
  misc_feature (385)..(385): n is a, c, g, or t
  misc_feature (402)..(402): n is a, c, g, or t
  misc_feature (411)..(411): n is a, c, g, or t
  misc_feature (499)..(499): n is a, c, g, or t
  misc_feature (517)..(517): n is a, c, g, or t
  misc_feature (538)..(538): n is a, c, g, or t
  misc_feature (543)..(543): n is a, c, g, or t
  misc_feature (556)..(556): n is a, c, g, or t
cgagtataaagacatgtagcaataacgnggagtngggggggagtctcacagtgcctttggaagggcccgaacttgccttaaatcttcctcaaccaaataagtattttattagtgcttgagagaatctgaatgtaggatgggttcaactgcacaaaaggaaaagatttttaccactttttttatatagatataaagtgaagcaaccgccttagtgctgaaatatgtagtacatgaatatgccttgtttaattacagaaaattccaaaacttgtactatttttttttccatgtagaaaggcaggaatgtctcctaagctttcctggacagcaagatgaatgagcggtacttttaagttttgtacgtangggtacaagtttgggagcnacctaatatggtactcncctgggacntacctttggggacaggaagttaaggttttttggaaatggtaaaccaaggattaaggtccaacctttgaagtttggtaaatataatttngggggggaaatccagccncaccaaccaaatttggggacncggtnaaacaattggtanccggtaaaagggttt

SEQ ID NO: 725 - DNA, 378 bp, Artificial Sequence
  Description of Artificial sequences:primer
  misc_feature (1)..(378): 3' terminal sequence from clone image:322452. chromogranin a (parathyroid secretory protein 1)(CHGA) gene.
  misc_feature (358)..(358): n is a, c, g, or t
ttttttttttttttttttttcagaggaaagagcccagaacagatttatttttctttagataaagttcatacagaatatgttacagtcaggagttctcagctttcaccaaaaggtcagaagttattgcagttgtgcccagtggataggatggaggaagggaaacttctagaaagctgcctgtgttcagagaaggaatcgtcaatgtttaaagttgtggggctgccctgcaaaggatgttccagggcaggtaggagtcaggagtaggagacaaggcgcgtagggggcgatagggtggcctgggcttgggcaggctggaggctgcctccctaccggaagcagcatccgggccatctggcanggacctgccaacctcgttcc

SEQ ID NO: 726 - DNA, 375 bp, Artificial Sequence
  Description of Artificial sequences:primer
  misc_feature (1)..(375): 5' terminal sequence from clone image:322452. chromogranin a (parathyroid secretory protein 1)(CHGA) gene.
  misc_feature (1)..(1): n is a, c, g, or t
  misc_feature (16)..(16): n is a, c, g, or t
natttcggaacgaggnttggcaggtcctggccagatgccgcgatgctgcttccggtaggacggcagctccagcctgcccaagcccaggccaccctatcgccccctacgcgccttgtctcctactcctgactcctacctgccctggaacatcctttgcagggcagccccacaactttaaacattgacgattccttctctgaacacaggcagctttctagaagtttcccttcctccatcctatccactgggcacaactgcaataacttctgaccttttggtgaaagctgagaactcctgactgtaacatattctgtatgaactttatctaaagaaaaataaatctgttctgggctctttcctctgaaaaaaaaaaaa

SEQ ID NO: 727 - DNA, 1994 bp, Artificial Sequence
  Description of Artificial sequences:primer
  misc_feature (1)..(1994): chromogranin a (parathyroid secretory protein 1)(CHGA) gene.
gctgccaccgctcctgccactgcagtgctcgagccccgtgcaggggagcttgcgggaggatcgaccgacagacggacgcacgccgaggcactgcgcccccagccccgcgccggtgccaccgcagcccgaccccggccgccagtccagccgcccctcgcccggtgcctaggtgcccggccccacaccgccagctgctcggcgcccgggtccgccatgcgctccgccgctgtcctggctcttctgctctgcgccgggcaagtcactgcgctccctgtgaacagccctatgaataaaggggataccgaggtgatgaaatgcatcgttgaggtcatctccgacacactttccaagcccagccccatgcctgtcagccaggaatgttttgagacactccgaggagatgaacggatcctttccattctgagacatcagaatttactgaaggagctccaagacctcgctctccaaggcgccaaggagagggcacatcagcagaagaaacacagcggttttgaagatgaactctcagaggttcttgagaaccagagcagccaggccgagctgaaagaggcggtggaagagccatcatccaaggatgttatggagaaaagagaggattccaaggaggcagagaaaagtggtgaagccacagacggagccaggccccaggccctcccggagcccatgcaggagtccaaggctgaggggaacaatcaggcccctggggaggaagaggaggaggaggaggaggccaccaacacccaccctccagccagcctccccagccagaaatacccaggcccacaggccgagggggacagtgagggcctctctcagggtctggtggacagagagaagggcctgagtgcagagccagggtggcaggcaaagagagaagaggaggaggaggaggaggaggaggctgaggctggagaggaggctgtccccgaggaagaaggccccactgtagtgctgaacccccacccgagccttggctacaaggagatccggaaaggcgagagtcggtcggaggctctggctgtggatggagctgggaagcctggggctgaggaggctcaggaccccgaagggaagggagaacaggagcactcccagcagaaagaggaggaggaggagatggcagtggtcccgcaaggcctcttccggggtgggaagagcggagagctggagcaggaggaggagcggctctccaaggagtgggaggactccaaacgctggagcaagatggaccagctggccaaggagctgacggctgagaagcggctggaggggcaggaggaggaggaggacaaccgggacagttccatgaagctctccttccgggcccgggcctacggcttcaggggccctgggccgcagctgcgacgaggctggaggccatcctcccgggaggacagccttgaggcgggcctgcccctccaggtccgaggctaccccgaggagaagaaagaggaggagggcagcgcaaaccgcagaccagaggaccaggagctggagagcctgtcggccattgaagcagagctggagaaagtggcccaccagctgcaggcactacggcggggctgagacaccggctggcagggctggccccagggcaccctgtggccctggctctgctgtccccttggcaggtcctggccagatggcccggacgctgcttccggtagggaggcagcctccagcctgcccaagcccaggccaccctatcgccccctacgcgccttgtctcctactcctgactcctacctgccctggaacatcctttgcagggcagccccacaactttaaacattgacgattccttctctgaacacaggcagctttctagaagtttcccttcctccatcctatccactgggcacaactgcaataacttctgaccttttggtgaaagctgagaactcctgactgtaacatattctgtatgaactttatctaaagaaaaataaatctgttctgggctctttcctctg

SEQ ID NO: 728 - DNA, 476 bp, Artificial Sequence
  Description of Artificial sequences:primer
  misc_feature (1)..(476): 3' terminal sequence from clone image:322471. small nuclear ribonucleoprotein polypeptide c(SNRPC) gene.
  misc_feature (380)..(380): n is a, c, g, or t
  misc_feature (410)..(410): n is a, c, g, or t
  misc_feature (415)..(415): n is a, c, g, or t
  misc_feature (428)..(428): n is a, c, g, or t
  misc_feature (433)..(433): n is a, c, g, or t
  misc_feature (452)..(452): n is a, c, g, or t
  misc_feature (473)..(473): n is a, c, g, or t
ttttttttttttttttttttttaactgaaagagttgacaattttattttcacatttcccaatacaaaggaaaactgcatcttttttgtcccacttctcccctccaaaactattctctttcataggacaggggagcaagtcttccttatgctcgtttagaaaactcagtatcacagcagcatgatctcctggtgaagcagaacaggtaatataaaaccgatacaataaggcctcccctctatccttatctgtctggtcgaagtcattccgggccgagtgggcaccatcatgggacgggcaggaggtctcatcatttgggggcccaggcatcattggcatatggcctcccatgggcgggctcattccaggagcaggtcccantgggcatcaatcccaggaaggaagaagggnccatnattgggcatcctngggangggccccccaatatggggngcttggcatcataccagggcnaag

SEQ ID NO: 729 - DNA, 372 bp, Artificial Sequence
  Description of Artificial sequences:primer
  misc_feature (1)..(372): 5' terminal sequence from clone image:322471. small nuclear ribonucleoprotein polypeptide c(SNRPC) gene.
  misc_feature (12)..(12): n is a, c, g, or t
  misc_feature (17)..(17): n is a, c, g, or t
  misc_feature (272)..(272): n is a, c, g, or t
  misc_feature (315)..(315): n is a, c, g, or t
  misc_feature (337)..(337): n is a, c, g, or t
  misc_feature (342)..(342): n is a, c, g, or t
  misc_feature (347)..(347): n is a, c, g, or t
  misc_feature (353)..(354): n is a, c, g, or t
  misc_feature (359)..(359): n is a, c, g, or t
  misc_feature (362)..(362): n is a, c, g, or t
  misc_feature (368)..(368): n is a, c, g, or t
gagtggccaacntggcnagagaacatgcccaagttttattgtgactactgcgatacatacctcacccatgactctccatctgtgagaaagacacactgcagtggaaggaaacacaaagagaatgtgaaagactattatcagaaatggatggaagagcaggctcagagcctgatttgacaaaacaacggctgcatttcaacaaggaaagatacctcctactccattctctgctcctcctcctgcaggggcgatgataccacctccccccagcnttccgggtcctcctcggccctggtatgatgcaagaacccaatnatgggggcccttccaattgatngcaantgatngggccnncctcntcntgggantgat

SEQ ID NO: 730 - DNA, 733 bp, Artificial Sequence
  Description of Artificial sequences:primer
  misc_feature (1)..(733): small nuclear ribonucleoprotein polypeptide c(SNRPC) gene.
gaattccagagcaacatgcccaagttttattgtgactactgcgatacatacctcacccatgactctccatctgtgagaaagacacactgcagtggaaggaaacacaaagagaatgtgaaagactattatcagaaatggatggaagagcaggctcagagcctgattgacaaaacaacggctgcatttcaacaaggaaagatacctcctactccattctctgctcctcctcctgcaggggcgatgataccacctccccccagccttccgggtcctcctcgccctggtatgatgccagcaccccatatggggggccctcccatgatgccaatgatgggccctcctcctcctgggatgatgccagtgggacctgctcctggaatgaggccgcccatgggaggccatatgccaatgatgcctgggcccccaatgatgagacctcctgcccgtcccatgatggtgcccactcggcccggaatgactcgaccagacagataaggatagaggggaggccttattgtatcggttttatattacctgttctgcttcaccaggagatcatgctgctgtgatactgagttttctaaacagcataaggaagacttgctcccctgtcctatgaaagagaatagttttggaggggagaagtgggacaaaaaagatgcagttttcctttgtattgggaaatgtgaaaataaaattgtcaactctttcagttaaaaaaaaaaaggaattc

SEQ ID NO: 731 - DNA, 502 bp, Artificial Sequence
  Description of Artificial sequences:primer
  misc_feature (1)..(502): 3' terminal sequence from clone image:322495. aryl hydrocarbon receptor interacting protein(AIP) gene.
  misc_feature (327)..(327): n is a, c, g, or t
  misc_feature (399)..(399): n is a, c, g, or t
  misc_feature (404)..(404): n is a, c, g, or t
  misc_feature (418)..(418): n is a, c, g, or t
  misc_feature (428)..(428): n is a, c, g, or t
  misc_feature (436)..(436): n is a, c, g, or t
  misc_feature (448)..(448): n is a, c, g, or t
  misc_feature (468)..(468): n is a, c, g, or t
  misc_feature (482)..(482): n is a, c, g, or t
  misc_feature (497)..(497): n is a, c, g, or t
ttttttgagagataaataaaggcctttatatacacagaagcatgacgcagcacgggcaggggggctggcagctgcagcagtgggcttggcaggtaaggcagggcaagtgctcctgtcaatgggagaagatcccccggaaccggctttgtcctcttcgtccttctgccggatccgtgcctccagggcccgcagctctcggctcaccacaggcgccagggctgggtccagctccagcactttggcaaagtcagcctgggcctcctgggcattccacacggccgcgtgggccttgcccgctttgaaagtaggccttgacgttgtcgtcgnaacttggttgaagggatggaaaaagcagttggtccaagaacctccgtaagtaattcctcggaccaacaaagntttgnacttgggaattaanttgaagcagnaacggccntgaatctgcttntccaactggattccattcanggggacccaggctngttccttaaattggnaggtt

SEQ ID NO: 732 - DNA, 459 bp, Artificial Sequence
  Description of Artificial sequences:primer
  misc_feature (1)..(459): 5' terminal sequence from clone image:322495. aryl hydrocarbon receptor interacting protein(AIP) gene.
  misc_feature (1)..(1): n is a, c, g, or t
  misc_feature (13)..(14): n is a, c, g, or t
  misc_feature (17)..(19): n is a, c, g, or t
  misc_feature (23)..(23): n is a, c, g, or t
  misc_feature (50)..(50): n is a, c, g, or t
  misc_feature (52)..(52): n is a, c, g, or t
  misc_feature (55)..(55): n is a, c, g, or t
  misc_feature (57)..(57): n is a, c, g, or t
  misc_feature (59)..(59): n is a, c, g, or t
  misc_feature (61)..(61): n is a, c, g, or t
  misc_feature (186)..(186): n is a, c, g, or t
  misc_feature (200)..(200): n is a, c, g, or t
  misc_feature (204)..(204): n is a, c, g, or t
  misc_feature (325)..(325): n is a, c, g, or t
  misc_feature (391)..(391): n is a, c, g, or t
  misc_feature (420)..(420): n is a, c, g, or t
natttcggcacgnnggnnngaangaggatggcggatatcatcagcaagantnacncngntncgggatccaaaaacgtgtgatacaggaaggccgaggagagctcccggactttcaagatgggaccaaggccacgttccactacccggacgctgcacagtgacgacgagggcaccgtgctggacganagccgggctcgtgncaancccatggagctcatcattggcaagaagttcaagctgcctgtgtgggagaccatcgtgtgcaccatgcgagaaggggagattgcccaagttcctctgtgacatcaagcatgtggtcctgtanccgctggtggccaagaagtctccgcaacatcgcggtgggcaaaggaccccctggagggccaagcgnacttggctgcggtgtttgcacagatgcgntgaacacagctccctggggccatgctgacctggacgcct

SEQ ID NO: 733 - DNA, 1244 bp, Artificial Sequence
  Description of Artificial sequences:primer
  misc_feature (1)..(1244): aryl hydrocarbon receptor interacting protein(AIP) gene.
gcacgaggaaaatggcgctagctcggaagctaccgaggtgctaggagttgccgaagcaagtccggaagctaccgagcgagtccggaagttgccgaaagggagcagcggggaaggaggatggcggatatcatcgcaagactccgggaggacgggatccaaaaacgtgtgatacaggaaggccgaggagagctcccggactttcaagatgggaccaaggccacgttccactaccggacgctgcacagtgacgacgagggcaccgtgctggacgacagccgggctcgtggcaagcccatggagctcatcattggcaagaagttcaagctgcctgtgtgggagaccatcgtgtgcaccatgcgagaaggggagattgcccagttcctctgtgacatcaagcatgtggtcctgtacccgctggtggccaagagtctccgcaacatcgcggtgggcaaggaccccctggagggccagcggcactgctgcggtgttgcacagatgcgtgaacacagctccctgggccatgctgacctggacgccctgcagcagaacccccagcccctcatcttccacatggagatgctgaaggtggagagccctggcacgtaccagcaggacccatgggccatgacagacgaagagaaggcaaaggcagtgccacttatccaccaggagggcaaccggttgtaccgcgaggggcatgtgaaggaggctgctgccaagtactacgatgccattgcctgcctcaagaacctgcagatgaaggaacagcctgggtcccctgaatggatccagctggacaagcagatcacgccgctgctgctcaactactgccagtgcaagctggtggtcgaggagtactacgaggtgctggaccactgctcttccatcctcaacaagtacgacgacaacgtcaaggcctacttcaagcggggcaaggcccacgcggccgtgtggaatgcccaggaggcccaggctgactttgccaaagtgctggagctggacccagccctggcgcctgtggtgagccgagagctgcgggccctggaggcacggatccggcagaaggacgaagaggacaaagcccggttccgggggatcttctcccattgacaggagcacttggccctgccttacctgccaagcccactgctgcagctgccagcccccctgcccgtgctgcgtcatgcttctgtgtatataaaggcctttatttatctctcaaaaaaaaaaaaaaaaaaaaaaaa

SEQ ID NO: 734 - DNA, 458 bp, Artificial Sequence
  Description of Artificial sequences:primer
  misc_feature (1)..(458): 3' terminal sequence from clone image:323001. interferon regulatory factor 1(IRF1) gene.
  misc_feature (400)..(400): n is a, c, g, or t
  misc_feature (414)..(414): n is a, c, g, or t
  misc_feature (421)..(421): n is a, c, g, or t
  misc_feature (453)..(453): n is a, c, g, or t
ttttttttttttttttttaacaatttactttttataaaaagacaaatgtacatatttacacacgtcctatgtgttcacacatgacttaatggttagatgacatttccaattttaagtcataccaaggcgctcacacttccctccctgggcctgttgagggctgctggggcttgagggggtggtgggcgccgagcaaggcactgtataaataaatgcaaaggccaagagctcgggggaaatgttagtgtacacctctgatcagaaatgtggcaagatccacacgaaaaagtgccaagtttttttcccaagcccctcagccaaagcagggagcagggtagagctcctctgaggctgagggagcatccgcccgaaggacccccactttccttcacattcactnggtttggaacagtnccagggntcagctgaaaagggggagttcttttgggaacnaattc

SEQ ID NO: 735 - DNA, 460 bp, Artificial Sequence
  Description of Artificial sequences:primer
  misc_feature (1)..(460): 5' terminal sequence from clone image:323001. interferon regulatory factor 1(IRF1) gene.
  misc_feature (28)..(28): n is a, c, g, or t
  misc_feature (170)..(170): n is a, c, g, or t
  misc_feature (327)..(327): n is a, c, g, or t
  misc_feature (331)..(331): n is a, c, g, or t
  misc_feature (333)..(333): n is a, c, g, or t
  misc_feature (410)..(410): n is a, c, g, or t
gaggagccagaaattgacagcccagggngggatattgggctgagtctacagcgtgtcttcacagatctgaagaacatggatgccacctggctggacagctgctgaccccagtccggttgccctccatccaggccattccctgtgcaccgtagcagggcccctggccctcnttattcctctaggcaagcaggacctggcatcatggtggatatggtgcagagaagctggacttctgtgggcccctcaacagccaagtgtgaccccactgccaagtgggactggggcctccctccttgggtcattgacctctcagggcctggcaggcangtgncntgggtttttcttgtggtgtaaagctgggccctgcctcctgggaagatgaggttctgagaccagttgtatcaggtcanggacttgggacaggagtcagtgtctggctttttcctctgagcccaagcta

SEQ ID NO: 736 - DNA, 2035 bp, Artificial Sequence
  Description of Artificial sequences:primer
  misc_feature (1)..(2035): interferon regulatory factor 1(IRF1) gene.
cgagccccgccgaaccgaggccacccggagccgtgcccagtccacgccggccgtgcccggcggccttaagaaccaggcaacctctgccttcttccctcttccactcggagtcgcgctccgcgcgccctcactgcagcccctgcgtcgccgggaccctcgcgcgcgaccagccgaatcgctcctgcagcagagccaacatgcccatcactcggatgcgcatgagaccctggctagagatgcagattaattccaaccaaatcccggggctcatctggattaataaagaggagatgatcttccagatcccatggaagcatgctgccaagcatggctgggacatcaacaaggatgcctgtttgttccggagctgggccattcacacaggccgatacaaagcaggggaaaaggagccagatcccaagacgtggaaggccaactttcgctgtgccatgaactccctgccagatatcgaggaggtgaaagaccagagcaggaacaagggcagctcagctgtgcgagtgtaccggatgcttccacctctcaccaagaaccagagaaaagaaagaaagtcgaagtccagccgagatgctaagagcaaggccaagaggaagtcatgtggggattccagccctgataccttctctgatggactcagcagctccactctgcctgatgaccacagcagctacacagttccaggctacatgcaggacttggaggtggagcaggccctgactccagcactgtcgccatgtgctgtcagcagcactctccccgactggcacatcccagtggaagttgtgccggacagcaccagtgatctgtacaacttccaggtgtcacccatgccctccacctctgaagctacaacagatgaggatgaggaagggaaattacctgaggacatcatgaagctcttggagcagtcggagtggcagccaacaaacgtggatgggaaggggtacctactcaatgaacctggagtccagcccacctctgtctatggagactttagctgtaaggaggagccagaaattgacagcccagggggggatattgggctgagtctacagcgtgtcttcacagatctgaagaacatggatgccacctggctggacagcctgctgaccccagtccggttgccctccatccaggccattccctgtgcaccgtagcagggcccctgggcccctcttattcctctaggcaagcaggacctggcatcatggtggatatggtgcagagaagctggacttctgtgggcccctcaacagccaagtgtgaccccactgccaagtggggatgggcctccctccttgggtcattgacctctcagggcctggcaggccagtgtctgggtttttcttgtggtgtaaagctggccctgcctcctgggaagatgaggttctgagaccagtgtatcaggtcagggacttggacaggagtcagtgtctggctttttcctctgagcccagctgcctggagagggtctcgctgtcactggctggctcctaggggaacagaccagtgaccccagaaaagcataacaccaatcccagggctggctctgcactaagcgaaaattgcactaaatgaatctcgttccaaagaactaccccttttcagctgagccctggggactgttccaaagccagtgaatgtgaaggaaactcccctccttcggggcaatgctccctcagcctcagaggagctctaccctgctccctgctttggctgaggggcttgggaaaaaaacttggcactttttcgtgtggatcttgccacatttctgatcagaggtgtacactaacatttcccccgagctcttggcctttgcatttatttatacagtgccttgctcggggcccaccaccccctcaagccccagcagccctcaacaggcccagggagggaagtgtgagcgccttggtatgacttaaaattggaaatgtcatctaaccattaagtcatgtgtgaacacataaggacgtgtgtaaatatgtacatttgtctttttataaaaagtaaaattgtt

SEQ ID NO: 737 - DNA, 439 bp, Artificial Sequence
  Description of Artificial sequences:primer
  misc_feature (1)..(439): 3' terminal sequence from clone image:323650. cytochrome c oxidase subunit viia polypeptide 2 (liver)(COX7A2) gene.
  misc_feature (426)..(426): n is a, c, g, or t
  misc_feature (438)..(438): n is a, c, g, or t
tttttttcatggtaaagactgctttattggtggcagttactacaagtcaataaatattgatccccaaagaagagctcggttatttatcagattactggtccatagagagctgaatgaaactgaaccaagcgattgctgggatgactgaagtcactcctgcttcttgggaaatgaagccacagccagctcatatatggcatatgctgttccaccaactgtaagaatcatggtggctctatacaggagggcatcagctaccccaccctttagatacagtggaatttcatcatcctcctggaacagtttttgcttctccggaactttatttttaaaatgcctgcgggaagcagtggcttatcgtcctctgcccaatctgacgaagagccagcagattccgcagcatcttggctgttactgaccagcaancggccctcgtgnc

SEQ ID NO: 738 - DNA, 432 bp, Artificial Sequence
  Description of Artificial sequences:primer
  misc_feature (1)..(432): 5' terminal sequence from clone image:323650. cytochrome c oxidase subunit viia polypeptide 2 (liver)(COX7A2) gene.
ggcggttgctggtcagtaacagccaagatgctgcggaatctgctggctcttcgtcagattgggcagaggacgataagcactgcttcccgcagcgattttaaaaataaagttccggagaagcaaaaactgttccaggaggatgatgaaattccactgtatctaaagggtggggtagctgatgccctcctgtatagagccaccatgattcttacagttggtggaacagcatatgccatatatgagctggctgtggcttcatttcccaagaagcaggagtgacttcagtcatcccagcaatcgcttggttcagtttcattcagctctcctatggaccagtaatctgataaataacccgagctcttctttggggatcaatatttattgacttgtaagtaactgccacccaataaagcagtctttaccatgaaaaaa

SEQ ID NO: 739 - DNA, 470 bp, Artificial Sequence
  Description of Artificial sequences:primer
  misc_feature (1)..(470): cytochrome c oxidase subunit viia polypeptide 2 (liver)(COX7A2) gene.
gtagttccggttccggcgtggccattttcgttggtggtgttcagttgtggcggttgctggtcagtaacagccaagatgctgcggaatctgctggctcttcgtcagattgggcagaggacgataagcactgcttcccgcaggcattttaaaaataaagttccggagaagcaaaaactgttccaggaggatgatgaaattccactgtatctaaagggtggggtagctgatgccctcctgtatagagccaccatgattcttacagttggtggaacagcatatgccatatatgagctggctgtggcttcatttcccaagaagcaggagtgacttcagtcatcccagcaatcgcttggttcagtttcattcagctctctatggaccagtaatctgataaataaccgagctcttctttggggatcaatatttattgacttgtagtaactgccaccaataaagcagtctttaccatg

SEQ ID NO: 740 - DNA, 547 bp, Artificial Sequence
  Description of Artificial sequences:primer
  misc_feature (1)..(547): 3' terminal sequence from clone image:323681. hypothetical protein loc51255(LOC51255) gene.
  misc_feature (6)..(6): n is a, c, g, or t
  misc_feature (289)..(289): n is a, c, g, or t
  misc_feature (426)..(426): n is a, c, g, or t
  misc_feature (473)..(473): n is a, c, g, or t
  misc_feature (498)..(498): n is a, c, g, or t
  misc_feature (513)..(513): n is a, c, g, or t
  misc_feature (521)..(521): n is a, c, g, or t
  misc_feature (527)..(527): n is a, c, g, or t
  misc_feature (538)..(538): n is a, c, g, or t
tttttnttttttcgggtaaagaaacctttaatgaggattcaaggttaataaggaagacgcagagggccagcactcagccccaacctcctcacgtgtacatggctccatggaggttctccagtcggtgttgctgctgctgttttcgagccttatctcgtctgtgctcctcataagtgtcgtcatcagtgggcagctcatagcggcacaagggacaggaatttgtcttgcttagccagggcagaatgcacgctggaatggaaaaggtgatggcaaggcatctcaatggcantctcctcctcctcaaattccaaaagacacacggggcacttgagctcagcctgagagcctctgatgactgtcctggggaggttctcaaccacagtcttgggcagctggtggaggcaggtggtggtcccaatctactancaaccccaagtcttcaaagtccatcctattggaaagtgacttgcganctccagcagcatgttggttcccgtnccctgctcaggggtncgacgggntcgcantcgtgtttcancgaaataag

SEQ ID NO: 741 - DNA, 591 bp, Artificial Sequence
  Description of Artificial sequences:primer
  misc_feature (1)..(591): 5' terminal sequence from clone image:323681. hypothetical protein loc51255(LOC51255) gene.
  misc_feature (22)..(22): n is a, c, g, or t
  misc_feature (347)..(347): n is a, c, g, or t
  misc_feature (411)..(411): n is a, c, g, or t
  misc_feature (493)..(493): n is a, c, g, or t
  misc_feature (578)..(578): n is a, c, g, or t
  misc_feature (588)..(588): n is a, c, g, or t
agggctgtgtcagaaggctggncagccatggcgtgcctatttcgatgaacacgactgcgagccgtcggaccctgagcaggagacgcgaaccaacatgctgctggagctcgcaaggtcacttttcaataggatggactttgaagacttggggttggtagtagattgggaccaccacctgcctccaccagctgccaagactgtggttgagaacctccccaggacagtcatcagaggctctcaggctgagctcaagtgccccgtgtgtcttttggaatttgaggaggaggagactgccattgagatgccttgccatcacctttttccattccagctgcattctgccctgnctaagcaagacaaattcctgtcccttgtgccgctatgagctgcccactgatgacgacacttatngaggagcacagacgagataaggctcgaaaacagcagcagcaacaccgactggagaacctccatggagccatgtacacgtgangaagttggggctgagtgctggccctctgcgtcttccttattaaccttgaatcctcattaaaggtttctttacccaaaaaaaaaanggaaaaaacnggt

SEQ ID NO: 742 - DNA, 601 bp, Artificial Sequence
  Description of Artificial sequences:primer
  misc_feature (1)..(601): hypothetical protein loc51255(LOC51255) gene.
ccgagggctgtgtcagaaggctgggcagccatggcgtcctatttcgatgaacacgactgcgagccgtcggaccctgagcaggagacgcgaaccaacatgctgctggagctcgcaaggtcacttttcaataggatggactttgaagacttggggttggtagtagattgggaccaccacctgcctccaccagctgccaagactgtggttgagaacctccccaggacagtcatcagaggctctcaggctgagctcaagtgccccgtgtgtcttttggaatttgaggaggaggagactgccattgagatgccttgccatcaccttttccattccagctgcattctgccctggctaagcaagacaaattcctgtcccttgtgccgctatgagctgcccactgatgacgacacttatgaggagcacagacgagataaggctcgaaaacagcagcagcaacaccgactggagaacctccatggagccatgtacacgtgaggaggttggggctgagtgctggccctctgcgtcttccttattaaccttgaatcctcattaaaggtttctttaccctaaaaaaaaaaaaaaaaaaaaaaaaaaaaaaaaa

SEQ ID NO: 743 - DNA, 534 bp, Artificial Sequence
  Description of Artificial sequences:primer
  misc_feature (1)..(534): 3' terminal sequence from clone image:323753. coatomer protein complex, subunit zeta 2(COPZ2) gene.
  misc_feature (44)..(44): n is a, c, g, or t
  misc_feature (46)..(46): n is a, c, g, or t
  misc_feature (79)..(79): n is a, c, g, or t
  misc_feature (81)..(81): n is a, c, g, or t
tttttgcagaagacaaaagcaggtttattagggccctgggcagngnaatgcctaagatatgagttaaggccagggcgtngnagaaaaggtgactctcctgaggccaaacctttgcatctcagaagccctggctggaagaccttaggagtcagttctcgggagggacctggggatacagaggggtctctcctgaccctgggatctttgggcttttgccaggattggggaaatggtctggggggcagggagccttgaatccacagccttcatttcaataacgaccatttaatttgttccttggcagactgaagaacctggggccacactctgttcagtcaagccgccatcatctgccctaaaattcaccttctggatcacttgctgggggtcactctccagaatcacaccgccatccacaatctcgtccagcaccaagaaggctccgtccatgttctccagcaaccagcgcttctccacgttcttcctcattctcgtaaggatgagccaccacgtataggaagaagtcctcgtgcc

SEQ ID NO: 744 - DNA, 520 bp, Artificial Sequence
  Description of Artificial sequences:primer
  misc_feature (1)..(520): 5' terminal sequence from clone image:323753. coatomer protein complex, subunit zeta 2(COPZ2) gene.
  misc_feature (182)..(182): n is a, c, g, or t
gacctcttcctatacgtggtgggctcatcctacgagaatgaggaagaacgtggagaagcgctggttgctggagaacatggacggagccttcttggtgctggacgagattgtggatggcggtgtgattctggagagtgacccccagcaagtgatccagaaggtgaattttagggcagatgatnggcggcttgactgaacagagtgtggcccaggttcttcagtctgccaaggaacaaattaaatggtcgttattgaaatgaaggctgtggattcaaggctccctgccccccagaccatttccccaatcctggcaaaagccaaagatcccagggtcaggagagacccctctgtatccccaggtccctcccagaactgactcctaaggtctccagccagggcttctgagatgcaaaggtttggcctcaggagagtcaccttttctcacggccctggcttaaactcatatcttaggcattcctggccccaggcctaataaaacctgcttttgtcttctgcaaaa

SEQ ID NO: 745 - DNA, 914 bp, Artificial Sequence
  Description of Artificial sequences:primer
  misc_feature (1)..(914): coatomer protein complex, subunit zeta 2(COPZ2) gene.
ggcggcgagcggaatgcagcggcccgaggcctggccacgtccgcacccgggggagggggccgcggcggcccaggccgggggcccggcgccgcctgctcgagccggggagccctcggggctgcggttgcaggaaccttccctctacaccatcaaggctgttttcatcctagataatgacgggcgccggctgctggccaagtattatgatgacacattcccctccatgaaggagcagatggttttcgagaaaaatgtcttcaacaagaccagccggactgagagtgagattgcattttttgggggtatgaccatcgtctacaagaacagcattgacctcttcctatacgtggtgggctcatcctacgagaatgagctgatgctcatgtctgttctcacctgcctgtttgagtctctgaaccacatgttaaggaagaacgtggagaagcgctggttgctggagaacatggacggagccttcttggtgctggacgagattgtggatggcggtgtgattctggagagtgacccccagcaagtgatccagaaggtgaattttagggcagatgatggcggcttgactgaacagagtgtggcccaggttcttcagtctgccaaggaacaaattaaatggtcgttattgaaatgaaggctgtggattcaaggctccctgccccccagaccatttccccaatcctggcaaaagcccaaagatcccagggtcaggagagacccctctgtatccccaggtccctcccagaactgactcctaaggtctccagccagggcttctgagatgcaaaggtttggcctcaggagagtcaccttttctcacggccctggccttaactcatatcttaggcattcctggccccagggccctaataaacctgcttttgtcttctgcaaaaaaaaaa

SEQ ID NO: 746 - DNA, 488 bp, Artificial Sequence
  Description of Artificial sequences:primer
  misc_feature (1)..(488): 3' terminal sequence from clone image:323766. cytoskeleton-associated protein 1(CKAP1) gene.
  misc_feature (441)..(441): n is a, c, g, or t
  misc_feature (481)..(481): n is a, c, g, or t
tttttttttttgggtttctagtgaatttaatgcatgagtctcaaaaatcaatggcaaaggaaaaaatgaataaaattaaaatggggtcaggagaaaagggccatgggacacacaggaggggcagtcagtggctgagctaggagctgaagcaggggaattccttaggtgtcatatctcgtccaacccgtagtcctcctccgggaagtcccccaccgtcacgactgctggcttgacaaaggcgccatacttggcctggcattcgaagtagcgtttcccattcacactgccatcatttttccccagtggctcatcatagcggacaccaatccagtagccaggcttgaaatctgtgagacctacatacatgacggtgccccggcgaagggatttgtcccgccgcccgcacctcacagcggctgcccaaggggaatggagctgggnctgggccttcttcctcggccaagcgctgggggggctcggncttcctg

SEQ ID NO: 747 - DNA, 962 bp, Artificial Sequence
  Description of Artificial sequences:primer
  misc_feature (1)..(962): cytoskeleton-associated protein 1(CKAP1) gene.
  misc_feature (18)..(18): n is a, c, g, t or u
gcggcggctgcggagggntggtgaggcggctggaccggcctgcaggcatccgcaggcgcggcaagatggaggtgacgggggtgtcggcacccacggtgaccgttttcatcagcagctccctcaacaccttccgctccgagaagcgatacagccgcagcctcaccatcgctgagttcaagtgtaaactggagttgctggtgggcagccctgcttcctgcatggaactggagctgtatggagttgacgacaagttctacagcaagctggatcaagaggatgcgctcctgggctcctaccctgtagatgacggctgccgcatccacgtcattgaccacagtggcgcccgccttggtgagtatgaggacgtgtcccgggtggagaagtacacgatctcacaagaagcctacgaccagaggcaagacacggtccgctctttcctgaagcgcagaaagctcggccggtacaacgaggaggagcgggctcagcaggaggccgaggccgcccagcgcctggccgaggagaaggcccaggccagctccatccccgtgggcagccgctgtgaggtgcgggcggcgggacaatcccctcgccggggcaccgtcatgtatgtaggtctcacagatttcaagcctggctactggattggtgtccgctatgatgagccactggggaaaaatgatggcagtgtgaatgggaaacgctacttcgaatgccaggccaagtatggcgcctttgtcaagccagcagtcgtgacggtgggggacttcccggaggaggactacgggttggacgagatatgacacctaaggaattcccctgcttcagctcctagctcagccactgactgcccctcctgtgtgtgcccatggcccttttctcctgaccccattttaattttattcattttttcctttgccattgatttttgagactcatgcattaaattcactagaaacccaaaa

SEQ ID NO: 748 - DNA, 629 bp, Artificial Sequence
  Description of Artificial sequences:primer
  misc_feature (1)..(629): 3' terminal sequence from clone image:323863. ribosomal protein s3a(RPS3A) gene.
  misc_feature (570)..(570): n is a, c, g, or t
  misc_feature (579)..(579): n is a, c, g, or t
  misc_feature (613)..(613): n is a, c, g, or t
  misc_feature (615)..(615): n is a, c, g, or t
tttttttacaaatagcactttttatttgccactatttgaagtctgaactttaaacagattcttggactggtggttcatatccatcagctcgttcaactttagcacctgtctcgtccccagtggcttttccagaactactgccttcaccatgaagctccatgagctttcccaattcaaacttgggcttcttcagcatttttacttttctaacgaagacatcatggagaggataaatagattggcaagccttttctatgtcttttccaatgctgtctggaatcaatttattgaccacttctttcaagtcatttgtctgcacctctcgggtcatgatttccatcatcttcttccggatttggcggacctgttggtgctgagcataagaggtcttccgtatctgattgttgcgttttttagtaaaaccaacacagaacagacgaagcaagtaaccatcggtagtcttgacatcaacgtgagcttcaatcattggtctgccattttttgaccatggaacacattttgtcacgggtaagattcatgccatggaagttagtcaggcagttttacccnggacatctncagtaatcaggctgaatttccaaaaggcaacttnanaatctgcaaatcag

SEQ ID NO: 749 - DNA, 507 bp, Artificial Sequence
  Description of Artificial sequences:primer
  misc_feature (1)..(507): 5' terminal sequence from clone image:323863. ribosomal protein s3a(RPS3A) gene.
  misc_feature (172)..(172): n is a, c, g, or t
  misc_feature (176)..(178): n is a, c, g, or t
  misc_feature (185)..(186): n is a, c, g, or t
  misc_feature (189)..(189): n is a, c, g, or t
  misc_feature (200)..(202): n is a, c, g, or t
  misc_feature (206)..(206): n is a, c, g, or t
  misc_feature (219)..(219): n is a, c, g, or t
  misc_feature (224)..(224): n is a, c, g, or t
  misc_feature (241)..(241): n is a, c, g, or t
  misc_feature (331)..(331): n is a, c, g, or t
  misc_feature (361)..(361): n is a, c, g, or t
  misc_feature (373)..(373): n is a, c, g, or t
  misc_feature (390)..(390): n is a, c, g, or t
  misc_feature (493)..(493): n is a, c, g, or t
accatggcggttggcaagaacaagcgccttacgaaaggcggcaaaaagggagccaagaagaaagtggttgatccattttctaagaaagattggtatgatgtgaaagcacctgctatgttcaatataagaaatattggaaagacgctcgtcaccaggacccaaggaaccaaanttgnnnctaatgnnctnaagggtcttgnnnttcnaatgagtctctgntcganctgcagaatcgatgaanttgcatttagaaaattcaagctgattactgaagaatgttcatgggtaaaaactgccgtgactaacttccagtggcatggactcttacccntgacaaaatgttttccatgggtcaaaaaantggcagacaatngattgaagctcacgttnattgtcaagactaccgattggttactttgcttcgtctggttctgtgttgggtttttactaaaaaaacgccacaatcagatacggaagacctccttaatgctcngcacccaacaaagt

SEQ ID NO: 750 - DNA, 921 bp, Artificial Sequence
  Description of Artificial sequences:primer
  misc_feature (1)..(921): ribosomal protein s3a(RPS3A) gene.
cgcgactcccacttccgcccttttggctctctgaccagcaccatggcggttggcaagaacaagcgccttacgaaaggcggcaaaaagggagccaagaagaaagtggttgatccattttctaagaaagattggtatgatgtgaaagcacctgctatgttcaatataagaaatattggaaagacgctcgtcaccaggacccaaggaaccaaaattgcatctgatggtctcaagggtcgtgtgtttgaagtgagtcttgctgatttgcagaatgatgaagttgcatttagaaaattcaagctgattactgaagatgttcagggtaaaaactgcctgactaacttccatggcatggatcttacccgtgacaaaatgtgttccatggtcaaaaaatggcagacaatgattgaagctcacgttgatgtcaagactaccgatggttacttgcttcgtctgttctgtgttggttttactaaaaaacgcaacaatcagatacggaagacctcttatgctcagcaccaacaggtccgccaaatccggaagaagatgatggaaatcatgacccgagaggtgcagacaaatgacttgaaagaagtggtcaataaattgattccagacagcattggaaaagacatagaaaaggcttgccaatctatttatcctctccatgatgtcttcgttagaaaagtaaaaatgctgaagaagcccaagtttgaattgggaaagctcatggagcttcatggtgaaggcagtagttctggaaaagccactggggacgagacaggtgctaaagttgaacgagctgatggatatgaaccaccagtccaagaatctgtttaaagttcagacttcaaatagtggcaaataaaaagtgctatttgtgatggtttgcttctgaaaaaaaaaaaaaaaaaaaaaaaaaaa

SEQ ID NO: 751 - DNA, 563 bp, Artificial Sequence
  Description of Artificial sequences:primer
  misc_feature (1)..(563): 3' terminal sequence from clone image:323948. sry (sex determining region y)-box 9 (campomelic dysplasia, autosomal sex-reversal)(SOX9) gene.
  misc_feature (451)..(451): n is a, c, g, or t
  misc_feature (491)..(491): n is a, c, g, or t
  misc_feature (505)..(505): n is a, c, g, or t
  misc_feature (511)..(511): n is a, c, g, or t
  misc_feature (518)..(518): n is a, c, g, or t
  misc_feature (532)..(532): n is a, c, g, or t
  misc_feature (545)..(545): n is a, c, g, or t
  misc_feature (555)..(555): n is a, c, g, or t
tttttaatgcaatgtatatttattgtaaacaataatatacaaaaaaaaaaaagagaaagaaaaagggaaaggtaagtttcacggagagaacaaaaggtttggggctgggagggaaacaagtgaaacaaacaaaacacgaacacaaaccaaagcttttacctaaagacaaaatatgatttaaatgccaggtttcttaagttacagaagtatctttttaaaaagatctgcttttatacagaaattgaaggatgccatattatgagtgctttaagattttattctactgacttctaaaactgttaatatatctttttttaaataaaaaaaaaagtttgctgtcttttttaaaaagcaatcctcaaactctctagccacagcagtaattaagattaaggtctgtcagtgggctgatcccctccaggtagcctccctcactccaagagaagatgcngagaaatatgggatggacacatgcctgcatgtttttgtgnccaaacacacacanacccanacacacncacaatataaggcngccccaaggtctntggccgaaancctggcaa

SEQ ID NO: 752 - DNA, 3936 bp, Artificial Sequence
  Description of Artificial sequences:primer
  misc_feature (1)..(3936): sry (sex determining region y)-box 9 (campomelic dysplasia, autosomal sex-reversal)(SOX9) gene.
ggagagccgaaagcggagctcgaaactgactggaaacttcagtggcgcggagactcgccagtttcaaccccggaaacttttctttgcaggaggagaagagaaggggtgcaagcgcccccacttttgctctttttcctcccctcctcctcctctccaattcgcctccccccacttggagcgggcagctgtgaactggccaccccgcgccttcctaagtgctcgccgcggtagccggccgacgcgccagcttccccgggagccgcttgctccgcatccgggcagccgaggggagaggagcccgcgcctcgagtccccgagccgccgcggcttctcgcctttcccggccaccagccccctgccccgggcccgcgtatgaatctcctggaccccttcatgaagatgaccgacgagcaggagaagggcctgtccggcgcccccagccccaccatgtccgaggactccgcgggctcgccctgcccgtcgggctccggctcggacaccgagaacacgcggccccaggagaacacgttccccaagggcgagcccgatctgaagaaggagagcgaggaggacaagttccccgtgtgcatccgcgaggcggtcagccaggtgctcaaaggctacgactggacgctggtgcccatgccggtgcgcgtcaacggctccagcaagaacaagccgcacgtcaagcggcccatgaacgccttcatggtgtgggcgcaggcggcgcgcaggaagctcgcggaccagtacccgcacttgcacaacgccgagctcagcaagacgctgggcaagctctggagacttctgaacgagagcgagaagcggcccttcgtggaggaggcggagcggctgcgcgtgcagcacaagaaggaccacccggattacaagtaccagccgcggcggaggaagtcggtgaagaacgggcaggcggaggcagaggaggccacggagcagacgcacatctcccccaacgccatcttcaaggcgctgcaggccgactcgccacactcctcctccggcatgagcgaggtgcactcccccggcgagcactcggggcaatcccagggcccaccgaccccacccaccacccccaaaaccgacgtgcagccgggcaaggctgacctgaagcgagaggggcgccccttgccagaggggggcagacagccccctatcgacttccgcgacgtggacatcggcgagctgagcagcgacgtcatctccaacatcgagaccttcgatgtcaacgagtttgaccagtacctgccgcccaacggccacccgggggtgccggccacgcacggccaggtcacctacacgggcagctacggcatcagcagcaccgcggccaccccggcgagcgcgggccacgtgtggatgtccaagcagcaggcgccgccgccacccccgcagcagcccccacaggccccgccggccccgcaggcgcccccgcagccgcaggcggcgcccccacagcagccggcggcacccccgcagcagccacaggcgcacacgctgaccacgctgagcagcgagccgggccagtcccagcgaacgcacatcaagacggagcagctgagccccagccactacagcgagcagcagcagcactcgccccaacagatcgcctacagccccttcaacctcccacactacagcccctcctacccgcccatcacccgctcacagtacgactacaccgaccaccagaactccagctcctactacagccacgcggcaggccagggcaccggcctctactccaccttcacctacatgaaccccgctcagcgccccatgtacacccccatcgccgacacctctggggtcccttccatcccgcagacccacagcccccagcactgggaacaacccgtctacacacagctcactcgaccttgaggaggcctcccacgaagggcgacgatggccgagatgatcctaaaaataaccgaagaaagagaggaccaaccagaattccctttggacatttgtgtttttttgtttttttattttgttttgttttttcttcttcttcttcttccttaaagacatttaagctaaaggcaactcgtacccaaatttccaagacacaaacatgacctatccaagcgcattacccacttgtggccaatcagtggccaggccaaccttggctaaatggagcagcgaaatcaacgagaaactggactttttaaaccctcttcagagcaagcgtggaggatgatggagaatcgtgtgatcagtgtgctaaatctctctgcctgtttggactttgtaattatttttttagcagtaattaaagaaaaaagtcctctgtgaggaatattctctattttaaatatttttagtatgtactgtgtatgattcattaccattttgaggggatttatacatatttttagataaaattaaatgctcttatttttccaacagctaaactactcttagttgaacagtgtgccctagcttttcttgcaaccagagtatttttgtacagatttgctttctcttacaaaaagaaaaaaaaaatcctgttgtattaacatttaaaaacagaattgtgttatgtgatcagttttgggggttaactttgcttaattcctcaggctttgcgatttaaggaggagctgccttaaaaaaaaataaaggccttattttgcaattatgggagtaaacaatagtctagagaagcatttggtaagctttatgatatatatattttttaaagaagagaaaaacaccttgagccttaaaacggtgctgctgggaaacatttgcactcttttagtgcatttcctcctgcctttgcttgttcactgcagtcttaagaaagaggtaaaaggcaagcaaaggagatgaaatctgttctgggaatgtttcagcagccaataagtgcccgagcacactgcccccggttgcctgcctgggccccatgtggaaggcagatgcctgctcgctctgtcacctgtgcctctcagaacaccagcagttaaccttcaagacattccacttgctaaaattatttattttgtaaggagaggttttaattaaaacaaaaaaaaattcttttttttttttttttttccaattttaccttctttaaaataggttgttggagctttcctcaaagggtatggtcatctgttgttaaattatgttcttaactgtaaccagtttttttttatttatctctttaatcttttttattattaaaagcaagtttctttgtattcctcaccctagatttgtataaatgcctttttgtccatcccttttttctttgttgtttttgttgaaaacaaactggaaacttgtttctttttttgtataaatgagagattgcaaatgtagtgtatcactgagtcatttgcagtgttttctgccacagacctttgggctgccttatattgtgtgtgtgtgtgggtgtgtgtgtgttttgacacaaaaacaatgcaagcatgtgtcatccatatttctctacatcttctcttggagtgagggaggctacctggaggggatcagcccactgacagaccttaatcttaattactgctgtggctagagagtttgaggattgctttttaaaaaagacagcaaacttttttttttatttaaaaaaagatatattaacagttttagaagtcagtagaataaaatcttaaagcactcataatatggcatccttcaatttctgtataaaagcagatctttttaaaaaagatacttctgtaacttaagaaacctggcatttaaatcatattttgtctttaggtaaaagctttggtttgtgttcgtgttttgtttgtttcacttgtttccctcccagccccaaaccttttgttctctccgtgaaacttacctttccctttttctttctctttttttttttgtatattattgtttacaataaatatacattgcattaaaaagaaa

SEQ ID NO: 753 - DNA, 445 bp, Artificial Sequence
  Description of Artificial sequences:primer
  misc_feature (1)..(445): 3' terminal sequence from clone image:324006. down syndrome critical region gene 1(DSCR1) gene.
  misc_feature (319)..(319): n is a, c, g, or t
  misc_feature (396)..(396): n is a, c, g, or t
ttttttttttttttttttttctgtaaggagcatactgtgcccatttattatagaatgcagttaaaaaaaatattttgaggttagcctctccagtttaaaagcacttaacaagaaacacttggacagcgatgcaatcggtctctcccaaaccggctccctcttaccaagtaccgtaaacagggtttgagaacgttcaatcaatttcttgatatgaacaatcaaagcatttaatgcaaacatatttgcttctcaaagaataaaaccatcttccaaatttccaaagcatgcattgttacttggcattaagtatttcaaaatngacaaacattgttacggtattctaaggccaaaatataatacctatttaccagacataccacattacaactagaaaanaattacaaatgttaacctagtataacaattccatcaggaatgaatgggg

SEQ ID NO: 754 - DNA, 442 bp, Artificial Sequence
  Description of Artificial sequences:primer
  misc_feature (1)..(442): 5' terminal sequence from clone image:324006. down syndrome critical region gene 1(DSCR1) gene.
gaggaatctcactaggggcttgactgcgtgggtctgtagcgctttcactgtaagaaagcaagatgcattttagaaactttaactacagttttagctccctgattgcctgtgtggcaaacagtgatatcttcagcgaaagtgaaaccagggccaaatttgagtccctctttaggacgtatgacaaggacatcacctttcagtattttaagagcttcaaacgagtcagaataaacttcagcaaccccttctccgcagcacgatgccacggctccaagctgcataagactgagtttctgggaaaggaaatgaagttatattttgctcagaccttacacataggaagctcacacctggctccgccaaatccagacaagcagtttctgatctcccctcccgcctctccgccagtggggatggaaacaagtggaagatgcgaccccag

SEQ ID NO: 755 - DNA, 2289 bp, Artificial Sequence
  Description of Artificial sequences:primer
  misc_feature (1)..(2289): down syndrome critical region gene 1(DSCR1) gene.
ggcacgaggcgggggcggccgaggcggacgagggcggcggcgactggagcttcattgactgcgagatggaggaggtggacctgcaggacctgcccagcgccaccatcgcctgtcacctggacccgcgcgtgttcgtggacggcctgtgccgggccaaatttgagtccctctttaggacgtatgacaaggacatcacctttcagtattttaagagcttcaaacgagtcagaataaacttcagcaaccccttctccgcagcagatgccaggctccagctgcataagactgagtttctgggaaaggaaatgaagttatattttgctcagaccttacacataggaagctcacacctggctccgccaaatccagacaagcagtttctgatctcccctcccgcctctccgccagtgggatggaaacaagtggaagatgcgaccccagtcataaactatgatctcttatatgccatctccaagctggggccaggggaaaagtatgaattgcacgcagcgactgacaccactcccagcgtggtggtccatgtatgtgagagtgatcaagagaaggaggaagaagaggaaatggaaagaatgaggagacctaagccaaaaattatccagaccaggaggccggagtacacgccgatccacctcagctgaactggcacgcgacgaggacgcattccaaatcatactcacgggaggaatcttttactgtggaggtggctggtcacgacttcttcggaggtggcagccgagatcggggtggcagaaatcccagttcatgttgctcagaagagaatcaaggccgtgtccccttgttctaatgctgcacaccagttactgttcatggcacccgggaatgacttgggccaatcactgagtttgtggtgatcgcacaaggacatttgggactgtcttgagaaaacagataatgatagtgttttgtacttgttcttttctggtaggttctgtctgtgccaagggcaggttgatcagtgagctcaggagagagcttcctgtttctaagtggcctgcaggggccactctctactggtaggaagaggtaccacaggaagccgcctagtgcagagaggttgtgaaaacagcagcaatgcaatgtggaaattgtagcgtttcctttcttccctcatgttctcatgtttgtgcatgtatattactgatttacaagactaacctttgttcgtatataaagttacaccgttgttgttttacatcttttgggaagccaggaaagcgtttggaaaacgtatcacctttcccagattctcggattctcgactctttgcaacagcacttgcttgcggaactcttcctggaatgcattcactcagcatccccaaccgtgcaacgtgtaacttgtgcttttgcaaaagaagttgatctgaaattcctctgtagaatttagcttatacaattcagagaatagcagtttcactgccaacttttagtgggtgagaaattttagtttaggtgtttgggatcggacctcagtttctgttgtttcttttatgtggtggtttctatacatgaatcatagccaaaaacttttttggaaactgttggttgagatagttggttcttttaccccacgaagacatcaagatacacttgtaaataaagctgatagcatatattcatacctgttgtacacttgggtgaaaagtatggcagtgggagactaagatgtattaacctacctgtgaatcatatgttgtaggaaaagctgttcccatgtctaacaggacttgaattcaaagcatgtcaagtggatagtagatctgtggcgatatgagagggatgcagtgcctttccccattcattcctgatggaattgttatactaggttaacatttgtaatttttttctagttgtaatgtgtatgtctggtaaataggtattatattttggccttacaataccgtaacaatgtttgtcattttgaaatacttaatgccaagtaacaatgcatgctttggaaatttggaagatggttttattctttgagaagcaaatatgtttgcattaaatgctttgattgttcatatcaagaaattgattgaacgttctcaaaccctgtttacggtacttggtaagagggagccggtttgggagagaccattgcatcgctgtccaagtgtttcttgttaagtgcttttaaactggagaggctaacctcaaaatattttttttaactgcattctataataaatgggcacagtatgctccttacagaaaaaaaaaaaaaaaaaaaaaaaaaaaaaaaaaa

SEQ ID NO: 756 - DNA, 359 bp, Artificial Sequence
  Description of Artificial sequences:primer
  misc_feature (1)..(359): 3' terminal sequence from clone image:324257. v-ki-ras2 kirsten rat sarcoma 2 viral oncogene homolog(KRAS2) gene.
  misc_feature (239)..(239): n is a, c, g, or t
  misc_feature (337)..(337): n is a, c, g, or t
ttttttgtcactgtaactatttttattacattacaataattaggagtagtacagttcatgacaaaaatattacaaattttagatcacttcacagcacatactcctataaacatttaaaagttaatttcaattaaaagagtggtcatttttaatcgtttcgatatgaccaacattcctaggtcagcgcaaccaaatgatggaaaacaactggatcacactgcatatgtcccacaaaaganagcacaatgtacaaaatgtgcatgtttcagtttacactatacaaaaatagttaaaatacattccaggtaaacatggttacattaagaaatagtactangtaagaaattggcactcaaagg

SEQ ID NO: 757 - DNA, 227 bp, Artificial Sequence
  Description of Artificial sequences:primer
  misc_feature (1)..(227): 5' terminal sequence from clone image:324257. v-ki-ras2 kirsten rat sarcoma 2 viral oncogene homolog(KRAS2) gene.
  misc_feature (223)..(223): n is a, c, g, or t
gaacctaacttttataggttatcaaaactgttgtcaccattgcacaattttgtcctaatatatacatagaaactttgtggggcatgttaagttacagtttgcacaagttcatctcatttgtattccattgatttttttttcttctaaacattttttcttcaaacagtatataactttttttaggggatttttttttagacagcaaaaactatctgacgatttncacc

SEQ ID NO: 758 - DNA, 1486 bp, Artificial Sequence
  Description of Artificial sequences:primer
  misc_feature (1)..(1486): v-ki-ras2 kirsten rat sarcoma 2 viral oncogene homolog(KRAS2) gene.
ggccgcggcggcggaggcagcagcggcggcggcagtggcggcggcgaaggtggcggcggctcggccagtactcccggcccccgccatttcggactgggagcgagcgcggcgcaggcactgaaggcggcggcggggccagaggctcagcggctcccaggtgcgggagagaggcctgctgaaaatgactgaatataaacttgtggtagttggagctggtggcgtaggcaagagtgccttgacgatacagctaattcagaatcattttgtggacgaatatgatccaacaatagaggattcctacaggaagcaagtagtaattgatggagaaacctgtctcttggatattctcgacacagcaggtcaagaggagtacagtgcaatgagggaccagtacatgaggactggggagggctttctttgtgtatttgccataaataatactaaatcatttgaagatattcaccattatagagaacaaattaaaagagttaaggactctgaagatgtacctatggtcctagtaggaaataaatgtgatttgccttctagaacagtagacacaaaacaggctcaggacttagcaagaagttatggaattccttttattgaaacatcagcaaagacaagacagagagtggaggatgctttttatacattggtgagagagatccgacaatacagattgaaaaaaatcagcaaagaagaaaagactcctggctgtgtgaaaattaaaaaatgcattataatgtaatctgggtgttgatgatgccttctatacattagttcgagaaattcgaaaacataaagaaaagatgagcaaagatggtaaaaagaagaaaaagaagtcaaagacaaagtgtgtaattatgtaaatacaatttgtacttttttcttaaggcatactagtacaagtggtaatttttgtacattacactaaattattagcatttgttttagcattacctaatttttttcctgctccatgcagactgttagcttttaccttaaatgcttattttaaaatgacagtggaagtttttttttcctcgaagtgccagtattcccagagttttggtttttgaactagcaatgcctgtgaaaaagaaactgaatacctaagatttctgtcttggggtttttggtgcatgcagttgattacttcttatttttcttaccaagtgtgaatgttggtgtgaaacaaattaatgaagcttttgaatcatccctattctgtgttttatctagtcacataaatggattaattactaatttcagttgagaccttctaattggtttttactgaaacattgagggaacacaaatttatgggcttcctgatgatgattcttctaggcatcatgtcctatagtttgtcatccctgatgaatgtaaagttacactgttcacaaaggttttgtctcctttccactgctattagtcatggtcactctccccaaaatattatattttttctataaaaaaaaaa

SEQ ID NO: 759 - DNA, 456 bp, Artificial Sequence
  Description of Artificial sequences:primer
  misc_feature (1)..(456): 3' terminal sequence from clone image:324369. chitobiase, di-n-acetyl-(CTBS) gene.
tttttagtatacggataacaaaagtatatagcaacataataaaaatgcaagaaactagatctgttgatacagatcatctttctaactcttaatggtttgacaaaagatgttcatctctgtaacagctttggctttaagacttcccacatttcttcagtttgctgtttggctacagcatctccagagtagtcaagacagtttgcattccacatgccaatgccccgtaagcgatagttttgtatatatgttgcctttaaagaaatactctgagggttatcataccatacttgatgaaagtggccagcaggatctttatagttataataaggagcccgctgatctttatcccataggtttccagaaatagaactatttatttgcttcatgatcgttttgtagggcacctgacgtcctggcagcgtcactacaaggagccccccggaaaggggacttttg

SEQ ID NO: 760 - DNA, 1618 bp, Artificial Sequence
  Description of Artificial sequences:primer
  misc_feature (1)..(1618): chitobiase, di-n-acetyl-(CTBS) gene.
atgtcccggccgcagcttcgacgctggcgcctcgtctctagcccgccgagcggcgtcccgggtctagcgctgctggcgctgctggcgctgctggcgctgcggctcgcggccgggaccgactgcccatgcccggagcctgagctctgccgcccgattcgccaccatccagatttcgaggtctttgtgtttgatgttggacagaaaacttggaaatcttatgattggtcacagattacaactgtggcaacatttggaaaatatgactcagaacttatgtgctacgctcattcaaaaggagccagagtagtacttaaaggagatgtatccttaaaggatatcattgatcctgctttcagagcatcctggatagctcaaaaacttaatttggccaaaacacaatatatggatggaattaatatagatatagagcaagaagttaattgtttatcacctgaatatgatgcattaactgctttagtcaaagaaactacagactctttccatcgtgaaattgagggatcacaggtaacctttgatgtagcttggtctccaaagaacatagacagaagatgctataattatactggaatcgcagatgcttgtgacttcctctttgtgatgtcttatgatgaacaaagtcagatctggtcagaatgtattgcagcagccaatgctccctataatcagacattaactggatataatgactacatcaagatgagcattaatcctaagaaacttgtaatgggtgttccttggtatggttatgattatacctgcctgaatctgtctgaggatcatgtttgtaccattgcaaaagtccctttccggggggctccttgtagtgacgctgcaggacgtcaggtgccctacaaaacgatcatgaagcaaataaatagttctatttctggaaacctatgggataaagatcagcgggctccttattataactataaagatcctgctggccactttcatcaagtatggtatgataaccctcagagtatttctttaaaggcaacatatatacaaaactatcgcttacggggcattggcatgtggaatgcaaactgtcttgactactctggagatgctgtagccaaacagcaaactgaagaaatgtgggaagtcttaaagccaaagctgttacagagatgaacatcttttgtcaaaccattaagagttagaaagatgatctgtatcaacagatctagtttcttgcatttttattatgttgctatatacttttgttatccgtatactaaaaaaaaagaataaataaatgttttgattgtttgaatttgaaaaatacacacgaatgtcctcagtatccaggaacataaaggcaagaagcaagtcaacttacctattaaatattcctctattagatgtttcaacactataatttaattgggaaaaattgctttcagaattttattatgccatatttcccttcattatagtaaaatatatgctcacgaatcaatgctgatttttaaaatatgtataatctgaagtggaaattgtttgcttagagtttttaaaaacctagtctttgaaaagcagtttgtgctatacttttcccccaaccctccaataaatcttaaatttaaaacct

SEQ ID NO: 761 - DNA, 439 bp, Artificial Sequence
  Description of Artificial sequences:primer
  misc_feature (1)..(439): 3' terminal sequence from clone image:324684. protein phosphatase 1, regulatory (inhibitor) subunit 15a(PPP1R15A) gene.
  misc_feature (439)..(439): n is a, c, g, or t
ttttttttttttacaaatcaaaaggctttattccttatataaacccacacttagaaaaaataaatagttaataaattataggcaaaccagttggtctcagccacgcctcccactgaggtccagggcagccgctgcagcagcagaggagcgggaaggtgtagccacagcttggctcaagggcgtggtctggactggggacgaagggacagaggaggaaggcaaggtctgggtgagggcagggatgggggctaaaggtgggttcctgaggcgtgcccaggctctggcccgggagcaggggtgagagggatgtgggtctgactcagcttctcccaaggctgcttctgaatcatcttccttatcctcactatccacatcctcatcttcctcctcctccgtgtcctctcctggccgatacacccaggccttcaagaaagcactn

SEQ ID NO: 762 - DNA, 267 bp, Artificial Sequence
  Description of Artificial sequences:primer
  misc_feature (1)..(267): 5' terminal sequence from clone image:324684. protein phosphatase 1, regulatory (inhibitor) subunit 15a(PPP1R15A) gene.
  misc_feature (62)..(62): n is a, c, g, or t
  misc_feature (113)..(113): n is a, c, g, or t
  misc_feature (138)..(138): n is a, c, g, or t
  misc_feature (154)..(154): n is a, c, g, or t
  misc_feature (160)..(160): n is a, c, g, or t
  misc_feature (196)..(196): n is a, c, g, or t
  misc_feature (212)..(212): n is a, c, g, or t
  misc_feature (250)..(250): n is a, c, g, or t
  misc_feature (258)..(258): n is a, c, g, or t
tcaaagcgcccaagaaacccctactcatgatccggaccctgagactcccctaaaggccaganaggtgcgcttctccgagaaggtcactgtccatttcctggctgtctgggcangggcggcccaggcgcaaatcctcangacccagcccagaggncccagntcaagtcctggtggtgccaacccaggtgatgaaganggagggtgaggtcaancctttgggggcagctgagaaggattggagaaagcttangtgtcatnaatggcatt

SEQ ID NO: 763 - DNA, 2349 bp, Artificial Sequence
  Description of Artificial sequences:primer
  misc_feature (1)..(2349): protein phosphatase 1, regulatory (inhibitor) subunit 15a(PPP1R15A) gene.
gctcttatcggttcccatcccagttgttgatcttatgcaagacgctgcacgaccccgcgcccgcttgtcgccacggcacttgaggcagccggagatactctgagttactcggagcccgacgcctgagggtgagatgaacgcgctggcctccctaaccgtccggacctgtgatcgcttctggcagaccgaaccggcgctcctgcccccggggtgacgcgcagcccccagccgcccagacacatggccccaggccaagcaccccatcaggctaccccgtggagggatgcccaccctttcttcctcctgtccccagtgatgggcctcctcagccgcgcctggagccgcctgaggggcctgggacctctagagccctggctggtggaagcagtaaaaggagcagctctggtagaagctggcctggagggagaagctaggactcctctggcaatcccccataccccttggggcagacgccctggagaggaggctgaagacagtggaggccctggagaggacagagaaacactggggctgaaaaccagcagttcccttcctgaagcctggggacttttggatgatgatgatggcatgtatggtgagcgagaggcaaccagtgtccctagagggcagggaagtcaatttgcagatggccagcgtgctcccctgtctcccagccttctgataaggacactgcaaggttctgataagaacccaggggaggagaaagccgaggaagagggagttgctgaagaggagggagttaacaagttctcttatccaccatcacaccgggagtgttgtccagccgtggaggaggaggacgatgaagaagctgtaaagaaagaagctcacagaacctctacttctgccttgtctccaggatccaagcccagcacttgggtgtcttgcccaggggaggaagagaatcaagccacggaggataaaagaacagaaagaagtaaaggagccaggaagacctccgtgtccccccgatcttcaggctccgaccccaggtcctgggagtatcgttcaggagaggcgtccgaggagaaggaggaaaaggcacacgaagaaactgggaaaggagaagctgccccagggccgcaatcctcagccccagcccagaggccccagctcaagtcctggtggtgccaacccagtgatgaagaggagagtgaggtcaagcctttgggggcagctgagaaggatggagaagctgagtgtcctccctgcatccccccaccaagtgccttcctgaaggcctgggtgtattggccaggagaggacacagaggaagaggaagatgaggaagaagatgaggacagtgactctggatcagatgaggaagagggagaagctgaggcttcctcttccactcctgctacaggtgtcttcttgaagtcctgggtctatcagccaggagaggacacagaggaggaggaagatgaggacagtgatacaggatcagccgaggatgaaagagaagctgagacttctgcttccacaccccctgcaagtgctttcttgaaggcctgggtgtatcggccaggagaggacacggaggaggaggaagatgaggatgtggatagtgaggataaggaagatgattcagaagcagccttaggagaagctgagtcagacccacatccctcccacccggaccagagtgcccacttcaggggctggggatatcgacctggaaaagagacagaggaagaggaagctgctgaggactggggagaagctgagccctgccccttccgagtggccatctatgtacctggagagaagccaccgcctccctgggctcctcctaggctgcccctccgactgcaaaggcggctcaagcgcccagaaacccctactcatgatccggaccctgagactcccctaaaggccagaaaggtgcgcttctccgagaaggtcactgtccatttcctggctgtctgggcagggccggcccaggccgcccgccagggcccctgggagcagcttgctcgggatcgcagccgcttcgcacgccgcatcgcccaggcccaggaggagctgagcccctgcctcacccctgctgcccgggccagagcctgggcacgcctcaggaacccacctttagcccccatccctgccctcacccagaccttgccttcctcctctgtcccttcgtccccagtccagaccacgcccttgagccaagctgtggctacaccttcccgctcctctgctgctgcagcggctgccctggacctcagtgggaggcgtggctgagaccaactggtttgcctataatttattaactatttattttttctaagtgtgggtttatataaggaataaagccttttgatttgt

SEQ ID NO: 764 - DNA, 459 bp, Artificial Sequence
  Description of Artificial sequences:primer
  misc_feature (1)..(459): 3' terminal sequence from clone image:324757. ribosomal protein s15a(RPS15A) gene.
  misc_feature (400)..(400): n is a, c, g, or t
tttttgtccatgaggcattttatttgtaaatatatgtattacatccctagaaaaagaatcccaggattttccctcctgtgtgttttcgtcttgcttcttcatggtccatgatgccagctgaggttgtcagtacaatgaaaccaaactggcgggatggaagcagattattctgccatttttccaggtctttgagttgcacgtcaaatctggggctgatcaccccacacttgtttagcctgcctgtgaggttcacaacaattttcccagctctgtggtcatcaatgatttcaaattcgccaatgtaaccatgcttcatcatcacagtgagaaaccggacgatgactttgggaagcacggcctaataagcacctggcggtttgcctccccttttcgggcattngttggatactcttgagaagcatctgccaaggacattcatggcgcaccattggtggcggg

SEQ ID NO: 765 - DNA, 461 bp, Artificial Sequence
  Description of Artificial sequences:primer
  misc_feature (1)..(461): 5' terminal sequence from clone image:324757. ribosomal protein s15a(RPS15A) gene.
  misc_feature (458)..(458): n is a, c, g, or t
tctttccgcgccgccacaatggtgcgcatgaatgtcctggcagatgctctcaagagtatcaacaatgccgaaaagagaggcaaacgccaggtgcttattaggccgtgctccaaagtcatcgtccggtttctcactgtgatgatgaagcatggttacattggcgaatttgaaatcattgatgaccacagagctgggaaaattgttgtgaacctcacaggcaggctaaacaagtgtggggtgatcagccccagatttgacgtgcaactcaaagacctggaaaaatggcagaataatctgcttccatcccgccaagtttggtttcattgtactgacaacctcagctggcatcatgggaccatgaagaagcaagacgaaaacacacaggagggaaaatcctgggattctttttctaagggatgtaatacatatatttacaaataaaatgcctcatggacaanaaa

SEQ ID NO: 766 - DNA, 468 bp, Artificial Sequence
  Description of Artificial sequences:primer
  misc_feature (1)..(468): 3' terminal sequence from clone image:324930. spermidine/spermine n1-acetyltransferase(SAT) gene.
  misc_feature (75)..(75): n is a, c, g, or t
  misc_feature (418)..(418): n is a, c, g, or t
  misc_feature (431)..(431): n is a, c, g, or t
tttttttaaatcaaagagtagtttattaaaaaagaatcaaacagaaactctaagtaccagtgtgtacattgtacnatttaaatgactcacgagaatgaagtttttttcaaatatattaagatcacaccaccttgttgtttatcgaaagatattcaaggagaaagatctgactctccaaactgcatctgagattgccactttaaacagacctcatttcaaacatgcaacaacgccactggtaataaagctttggaatgggtgctcattctattatttcactacaaacagcatagaaagcaagagaagttgggaatttattctaaaatagaatggaggttgtcatctacagcagcactcctcactcctctgttgccatttttagcaagtactccttggtccgatcttggaacagtctccnaccctcttcactnggacagatcagaagcacctccttccttttataggaaa

SEQ ID NO: 767 - DNA, 499 bp, Artificial Sequence
  Description of Artificial sequences:primer
  misc_feature (1)..(499): 5' terminal sequence from clone image:324930. spermidine/spermine n1-acetyltransferase(SAT) gene.
  misc_feature (193)..(193): n is a, c, g, or t
  misc_feature (421)..(421): n is a, c, g, or t
  misc_feature (427)..(427): n is a, c, g, or t
  misc_feature (445)..(445): n is a, c, g, or t
  misc_feature (471)..(471): n is a, c, g, or t
  misc_feature (483)..(483): n is a, c, g, or t
  misc_feature (490)..(490): n is a, c, g, or t
gctggtgtttatccgtcactcgccgaggttccttgggtcatggtgccagcctgactgagaagaggacgctcccgggagacgaatgaggaaccacctcctcctactgttcaagtacaggggcctggtccgcaaagggaagaaaagcaaaagacgaaaatggctaaattcgtgatccgcccagccactgccgccnactgcagtgacatactgcggctgatcaaggagctggctaaatatgaatacatggaagaacaagtaatcttaactgaaaaagatctgctagaagatggttttggaagagcaccccttttaccactgcctggttgcagaagtgccgaaagagacttgggactcccggaaagacacagcattgttgggtttggccatgtactaatttacctatgaacccgtggaattggcnaattantggtaaccttgaaggacnttcttccgtgaatgaagttattaaangaggccttgggnataagantcaagaaaa

SEQ ID NO: 768 - DNA, 1060 bp, Artificial Sequence
  Description of Artificial sequences:primer
  misc_feature (1)..(1060): spermidine/spermine n1-acetyltransferase(SAT) gene.
cgcgggccgactggtgtttatccgtcactcgccgaggttccttgggtcatggtgccagcctgactgagaagaggacgctcccgggagacgaatgaggaaccacctcctcctactgttcaagtacaggggcctggtccgcaaagggaagaaaagcaaaagacgaaaatggctaaattcgtgatccgcccagccactgccgccgactgcagtgacatactgcggctgatcaaggagctggctaaatatgaatacatggaagaacaagtaatcttaactgaaaaagatctgctagaagatggttttggagagcaccccttttaccactgcctggttgcagaagtgccgaaagagcactggactccggaaggacacagcattgttggttttgccatgtactattttacctatgacccgtggattggcaagttattgtatcttgaggacttcttcgtgatgagtgattatagaggctttggcataggatcagaaattctgaagaatctaagccaggttgcaatgaggtgtcgctgcagcagcatgcacttcttggtagcagaatggaatgaaccatccatcaacttctataaaagaagaggtgcttctgatctgtccagtgaagagggttggagactgttcaagatcgacaaggagtacttgctaaaaatggcaacagaggagtgaggagtgctgctgtagatgacaacctccattctattttagaataaattcccaacttctcttgctttctatgctgtttgtagtgaaataatagaatgagcacccattccaaagctttattaccagtggcgttgttgcatgtttgaaatgaggtctgtttaaagtggcaatctcagatgcagtttggagagtcagatctttctccttgaatatctttcgataaacaacaaggtggtgtgatcttaatatatttgaaaaaaacttcattctcgtgagtcatttaaatgtgtacaatgtacacactggtacttagagtttctgtttgattcttttttaataaactactctttgatttaaaaaaaaaaaaaaaaaaaaaaaaaaa

SEQ ID NO: 769 - DNA, 467 bp, Artificial Sequence
  Description of Artificial sequences:primer
  misc_feature (1)..(467): 3' terminal sequence from clone image:325058. g-rich rna sequence binding factor 1(GRSF1) gene.
  misc_feature (391)..(391): n is a, c, g, or t
  misc_feature (465)..(465): n is a, c, g, or t
tttttttttcagcctgaaacaagtcttcatttattgactacagtacagtgatttcgcatcttagctggtaatcaaagatggttatgtattaagtaagagaagacatagtctctcttccaggtatcacctgtcagaaacctgggcaaatttaattttaagaactagaactgcatctcctggtggcagtcgtcaccctgagaacaggaacaaggcaaagaaagcatacaggattttgattctcctacacaggtgcacataaagttagtttattaatgactatattttgaagccagccattttgtccaatatttaaataacaagctgtttaatattaaagcagaaagtactgccacattgtggacagaagtacagctttatccataaacccttncacacaatttatacattaaatggccatttttatttaaagcaaggcaccccctacttgttcctaaaatatggggntg

SEQ ID NO: 770 - DNA, 468 bp, Artificial Sequence
  Description of Artificial sequences:primer
  misc_feature (1)..(468): 5' terminal sequence from clone image:325058. g-rich rna sequence binding factor 1(GRSF1) gene.
  misc_feature (395)..(395): n is a, c, g, or t
agataataagggtgaagcaagaagcatttcatttgcacatctttcttggacttgggatatacagttccagtttattagcagcaactgctagggaaatgattttggtgttttgggttaattgcttctaagaaaagtttcatagtggactgtttagaagaagaaatgaaagatccagtttgggattatgaaataaaccacaaattaaaatttttgtttaaactgtccaggatctgatttaaaaatatggtctttgttttatatgattaaatggtttgttttcatagatgatatgttactcattgtaaagaccacatatttttattcagcagtgttccttaaaccgctttcatttaaaaagtaactttttttttttgcccgtggaattgagtgccccnggatgtaaaacctccccatgggagtgaaacagtgatttaattttaacccaaacattcccccaaagcccaagga

SEQ ID NO: 771 - DNA, 2690 bp, Artificial Sequence
  Description of Artificial sequences:primer
  misc_feature (1)..(2690): g-rich rna sequence binding factor 1(GRSF1) gene.
ggcacgagcaccatcgctgctggagcagctgccttcaggccctgcgccgcctccggagtccatggccggcacgcgctgggtactcggggcgctgctccggggctgcggctgtaactgcagcagctgccggcgcaccggcgccgcctgcctgcccttctactccgccgcgtcctaccctgccctccgtgcctctctgctgccgcagtcgctggcggcggcggccgccgtcccgacgcgcagctacagccaggagtccaaaactacttacctggaagaccttccaccaccccctgagtatgaattggccccgtccaagttagaagaggaagtggatgatgtctttctcattcgagctcaaggactgccctggtcatgcactatggaagatgtgcttaactttttttcagactgcagaatccgcaacggtgagaatggaatacattttctcctaaacagagatgggaaacgaaggggtgatgccttaattgaaatggagtcagagcaggatgtgcagaaagccttagagaagcaccgcatgtacatgggccagcggtatgtggaagtatatgagataaacaatgaagatgtggatgccttaatgaagagcttgcaggtcaaatcttcgcctgtggtaaatgatggtgtggttcgtttgagaggacttccttatagttgcaatgagaaagacattgtagacttctttgcaggactgaatatagttgacattacttttgtgatggactatagagggaggcgaaaaacaggggaagcctatgtgcaatttgaagaaccagaaatggccaaccaagccctgttgaaacacagggaagaaattggtaatcgatacatcgagatatttccaagcagaaggaatgaagttcgaacacatgtcggttcttataagggaaagaaaatcgcatcttttcctactgctaagtatataactgagccagaaatggtctttgaagaacatgaagtaaatgaggtatttcaacccatgacagcttttgaaagtgagaaggaaatagaattgcctaaggaggtgccagaaaagcttccagaggctgctgattttggaactacgtcttctctgcattttgtccacatgagaggattacctttccaagccaatgcccaagacattataaacttttttgctccactcaagcctgttagaatcaccatggaatacagctccagtgggaaggccactggagaagctgatgtgcactttgagacccatgaggatgctgttgcagcgatgctcaaggatcggtcccacgttcatcataggtatattgaactgttcctgaattcatgtccaaaaggaaaataagactctaggggctccagataataagggtgaagcaagaagcatttcatttgcacatctttcttggacttgggatatacagttccagtttattagcagcaactgctagggaaatgattttggtgttttgggttaattgcttctaagaaaagtttcatagtggactgtttagaagaagaaatgaaagatccagtttgggattatgaaataaaccacaaattaaaatttttgtttaaactgtccaggatctgatttaaaaatatggtctttgttttatatgattaaatggtttgttttcatagatgatatgttactcattgtaaagaccacatatttttattcagcagtgttctttaaacggtttcatttaaaaagtaactttttttttttgcctgtgaattgagtgctctgatgtaaaacttctcatggagtgaaacagtgatttattttaaccaaacattcaccaaagcaaagaacggtttcagacctttgaactggtatggtttggcagaatagttttaaattttgctgtatttgattacttagagataggaatttttaaaaatcaaaacaaaaaataccacagcttagtgtaaatgacaatttggcggttttatgtctttagaaatgttttgcctttctaagccttgtgctaaaggcgtataacggtggtgcctatctacttaagggggcattctagtcttaacttaaaagttgtctaaactgtccctccctggctttttttggtttggggtagacctaagggtgtttgttagtctcaaaactgtgaagtgacatgtcagaacagtccagactggtaagaaaattaatggcttcacttgaatttaaaccagctctagataggaaaaaaatcagtctcctcatttgctttttaaatggagtagtacatcccatattttagaacaagtaggggtgccttgcttaaataaaaatagcatttaatgtataattgtgtgaagggtttatggataaagctgtacttctgtcacaatgtggcagtactttctgctttaatattaaacagcttgttatttaaatattggacaaaatggctggcttcaaaatatagtcattaataaactaactttatgtgcacctgtgtaggagaatcaaaatcctgtatgctttctttgccttgttcctgttctcagggtgacgactgccaccaggagatgcagttctagttcttaaaattaaatttgcccaggtttctgacaggtgatacctggaagagagactatgtcttctcttacttaatacataaccatctttgattaccagctaagatgcgaaatcactgtactgtagtcaataaatgaagacttgtttcaggctg

SEQ ID NO: 772 - DNA, 406 bp, Artificial Sequence
  Description of Artificial sequences:primer
  misc_feature (1)..(406): 3' terminal sequence from clone image:325641. pregnancy specific beta-1-glycoprotein 5(PSG5) gene.
  misc_feature (6)..(6): n is a, c, g, or t
  misc_feature (12)..(12): n is a, c, g, or t
  misc_feature (14)..(14): n is a, c, g, or t
  misc_feature (17)..(17): n is a, c, g, or t
  misc_feature (42)..(42): n is a, c, g, or t
  misc_feature (57)..(57): n is a, c, g, or t
  misc_feature (88)..(88): n is a, c, g, or t
  misc_feature (94)..(94): n is a, c, g, or t
  misc_feature (100)..(100): n is a, c, g, or t
  misc_feature (112)..(112): n is a, c, g, or t
  misc_feature (122)..(122): n is a, c, g, or t
  misc_feature (138)..(138): n is a, c, g, or t
  misc_feature (144)..(144): n is a, c, g, or t
  misc_feature (152)..(152): n is a, c, g, or t
  misc_feature (167)..(167): n is a, c, g, or t
  misc_feature (183)..(183): n is a, c, g, or t
  misc_feature (189)..(189): n is a, c, g, or t
  misc_feature (378)..(378): n is a, c, g, or t
  misc_feature (401)..(401): n is a, c, g, or t
tttttnaacttnancanataactttattaccataaacatatnaatactcatgaatantttcccaattctggggcactcagatagagancaaaancaaatntttcaatttttntttacaaaantatactttaccaattnctcaanaaaaaaanttcataaatctgganaataaaacattcaaanaatcancacattttcaaatagaaaattatgaaaacattatgcttttgattatttagtccaataacatggagtttttttcttctttgtctagaatttcatgaaggtatcagcctgttcattaaaattttgaaagttcttagtccagtggtatgatcttggaagttatcagggaacttgatattcaagagtccttgntcagagtcttttcccataaatcnccttg

SEQ ID NO: 773 - DNA, 471 bp, Artificial Sequence
  Description of Artificial sequences:primer
  misc_feature (1)..(471): 5' terminal sequence from clone image:325641. pregnancy specific beta-1-glycoprotein 5(PSG5) gene.
  misc_feature (447)..(447): n is a, c, g, or t
  misc_feature (455)..(455): n is a, c, g, or t
  misc_feature (469)..(469): n is a, c, g, or t
gaaatgaaacaggaccctatgaatgtgaaatacgggaccgagatggtggcatgcacagtgacccagtcaccctgaatgtcctctatggtccagacctccccagcatttacccttcattcacctattaccgttcaggagaaaacctctacttgtcctgcttcgcggaatctaacccaccggcagagtatttttggacaattaatgggaagtttcagcaatcaggacaaaagctctctatcccccaaattactacaaagcatagacgggctctatacttgctctgttcgtaactcagccactggaacggaaagctccaaatccatgacagtcgaagtctctgctccttcaggaataggacgtcttcctctccttaatccaatatagcagccgtgaagtcatttctgtatttcaggaagactgggcagacagttgctttgattcttcctnaaactacntacaaatcacctanag

SEQ ID NO: 774 - DNA, 1636 bp, Artificial Sequence
  Description of Artificial sequences:primer
  misc_feature (1)..(1636): pregnancy specific beta-1-glycoprotein 5(PSG5) gene.
ggggaaggaggaaggacagcacagcctacagccgtgctcaggaagtttctggatcctaggctcagctccacagaggagaacacgcaggcgcagagaccatggggcccctctcagcccctccctgcacacagcacatcacctggaagggggtcctgctcacagcatcacttttaaacttctggaacctgcctatcactgctcaagtcacgattgaagccctgccacccaaagtttccgaggggaaggatgttcttctacttgtccacaatttgcctcagaatcttgctggctacatctggtacaaaggacaactgatggacctctaccattacattacatcatatgtagtagacggtcaaataaatatatatgggcctgcatacactggacgagaaacagtatattccaatgcatccctgctgatccagaatgtcacccgggaagacgcaggatcctataccttacacatcataaagcgaggtgataggactagaggagtaactggatatttcaccttcaacttatacctgaagctgcccaagccctacatcaccatcaacaactcaaaacccagggagaataaggatgtcttagccttcacctgtgaacctaagagtgagaactacacctacatttggtggctaaatggtcagagcctcccggtcagtcccagggtaaagcaacccattgaaaacaggatcctcattctacccagtgtcacgagaaatgaaacaggaccctatgaatgtgaaatacgggaccgagatggtggcatgcacagtgacccagtcaccctgaatgtcctctatggtccagacctccccagcatttacccttcattcacctattaccgttcaggagaaaacctctacttgtcctgcttcgcggaatctaacccaccggcagagtatttttggacaattaatgggaagtttcagcaatcaggacaaaagctctctatcccccaaattactacaaagcatagagggctctatacttgctctgttcgtaactcagccactggcaaggaaagctccaaatccatgacagtcgaagtctctgctccttcaggaataggacgtcttcctctccttaatccaatatagcagccgtgaagtcatttctgtatttcaggaagactggcagacagttgctttgattcttcctcaaactacttacaatcacctacagtccaaaattgctttttcttcaaggagatttatggaaaagactctgacaaggactcttgaatacaagttcctgataacttcaagatcataccactggactaagaactttcaaaattttaatgaacaggctgataccttcatgaaattctagacaaagaagaaaaaaactccatgttattggactaaataatcaaaagcataatgttttcataattttctatttgaaaatgtgctgattctttgaatgttttattctccagatttatgaactttttttcttgagcaattggtaaagtatacttttgtaaacaaaaattgaaacatttgcttttactctctatctgagtgccccagaattgggaaactattcatgagtattcatatgtttatggtaataaagttatctgcacaagttcaaaaaaaaaaaaaaaaaaaaaaaaaaaaaa

SEQ ID NO: 775 - DNA, 456 bp, Artificial Sequence
  Description of Artificial sequences:primer
  misc_feature (1)..(456): 3' terminal sequence from clone image:32698. stathmin-like 4(STMN4) gene.
  misc_feature (25)..(25): n is a, c, g, or t
  misc_feature (153)..(153): n is a, c, g, or t
  misc_feature (349)..(349): n is a, c, g, or t
  misc_feature (371)..(371): n is a, c, g, or t
  misc_feature (378)..(378): n is a, c, g, or t
  misc_feature (391)..(391): n is a, c, g, or t
  misc_feature (431)..(431): n is a, c, g, or t
  misc_feature (437)..(437): n is a, c, g, or t
ttttttttttcaatgtttcattggntcatgatgatcaaaaaatgatggttcacacacacacacagacctcatcccacctgctgcagggtggaagcaacaccactggtactcacaccccctctggctgggttctctggtgcgccctgcagccgntgccccacccagggactctgtcctttcaccctgaagttctaccgccctgggttttcatctctcctcaacatgggtgcctgggaggcttcaatgtccagggtaggagatgtgaaaatcagatcttgcgccgggcaggggtttgcaattgtcccttgagttttttcttccatttttcctttttcccaaaattttttcnttttgccctttttccaacccgntaattgntttccccgggaanaaattggggttgggttttaattgggtaaattttttaaaanattgtnacaaaaccccaagggggag

SEQ ID NO: 776 - DNA, 432 bp, Artificial Sequence
  Description of Artificial sequences:primer
  misc_feature (1)..(432): 5' terminal sequence from clone image:32698. stathmin-like 4(STMN4) gene.
  misc_feature (254)..(254): n is a, c, g, or t
  misc_feature (304)..(304): n is a, c, g, or t
  misc_feature (312)..(312): n is a, c, g, or t
  misc_feature (378)..(378): n is a, c, g, or t
  misc_feature (402)..(402): n is a, c, g, or t
  misc_feature (423)..(423): n is a, c, g, or t
tcatggcaagagcgagcagtggtgctgatgttgagagaagcccagggtaccactaattgagggagtgaggaagagagcagctcgcttctaactggactgcacgttggtgacagcgtcccaagctggtgacagacccactctgtaactttcagctagattcagccaccagatcccagaaacatgacccttgctgcctacaaagagaagatgaaggagctcccgctggtgtccttgttctgctcctgcttcctggncgatcccctgaataagtcgtcctacaaatatgaagcagacacggttgganctgaattngtgcgtcattttcgacatgggaagtcatcgagcttgaacaaatgcaccttggggccaattcctttngaagtcatcctgaaggccaacctnctttggatgggggtttccgantttcaacgg

SEQ ID NO: 777 - DNA, 1352 bp, Artificial Sequence
  Description of Artificial sequences:primer
  misc_feature (1)..(1352): stathmin-like 4(STMN4) gene.
gaggaagagagcagctcgcttctaactggactgcacgttggtgacagcgtcccaagctggtgacagacccactctgtaactttcagctagattcagccaccagatcccagaaacatgacccttgctgcctacaaagagaagatgaaggagctcccgctggtgtccttgttctgctcctgcttcctggccgatcccctgaataagtcgtcctacaaatatgaaggctggtgtgggagacagtgtaggaggaaggatgaaagccagcggaaagacagtgctgactggagagaaagaagagctcaggcagacacggtggacctgaattggtgcgtcatttccgacatggaagtcatcgagctgaacaaatgcacctcgggccaatcctttgaagtcatcctgaagccaccctcctttgatggggttcccgagttcaacgcctccctgccaaggcggcgagacccatccctggaagagatccagaagaaactagaagcggctgaggagcgaaggaagtaccaggaagcggagctcctgaaacacctagcagagaaacgggaacatgagagagaggtgatccaaaaggccattgaggaaaacaacaacttcatcaagatggctaaggaaaaactggcccagaagatggaatccaacaaggagaacagggaggcccacctcgccgccatgttggaacggctgcaagagaaggacaagcacgccgaggaggtgcggaaaaacaaggagctgaaggaagaggcctccaggtaaagcctagaggccaaagaactttccaggtcagccggacagctccagcagctccacgttccaggcagcctcgcccgccggctgcgctcccagcactggggtttggggggaggggggtggccaaggggcgtttcctctgcttttggtgtttgtacatgttaagaattgaccagtgaagccatcctatttgtttccggggaacaatgacggggtgggagaggggagaggagagagtttgggaaagggagatggagaagaactcaaggacattgcaaccctgcccggcgcagatctgattttcacatctctacctggacattgagcctccaggcaccatgttgaggagagatgaaaaccagggcggtagaacttcagggtgaaggacagagtcctgggtggggcagcggctgcagggcgcaccagagaacccagccagaggggttgtgagtaccagtggtgttgcttccaccctgcagcaggtgggatgaggtctgtgtgtgtgtgtgaaccatcattttttgatcatcatgaccaatgaaacattgactccaaaaaaaaaaaaaaaaaaaaaaaaaaaaaaaaaaaaaaaa

SEQ ID NO: 778 - DNA, 204 bp, Artificial Sequence
  Description of Artificial sequences:primer
  misc_feature (1)..(204): 3' terminal sequence from clone image:327684. cadherin 15, m-cadherin (myotubule)(CDH15) gene.
  misc_feature (73)..(73): n is a, c, g, or t
  misc_feature (94)..(94): n is a, c, g, or t
  misc_feature (140)..(140): n is a, c, g, or t
  misc_feature (197)..(197): n is a, c, g, or t
ttttttttttttttttttttttttttttttttttttttcattcagatttacccaggaggttgctgtctttcanacaaagatgaggttcactggnaggaggcaaaggtgggactagggaggtgacccgcatgggccagatnggagagaaactcttcccaccccggcagaaggggcctcttcctggccgccccatccanactcagg

SEQ ID NO: 779 - DNA, 457 bp, Artificial Sequence
  Description of Artificial sequences:primer
  misc_feature (1)..(457): 5' terminal sequence from clone image:327684. cadherin 15, m-cadherin (myotubule)(CDH15) gene.
  misc_feature (91)..(91): n is a, c, g, or t
  misc_feature (254)..(254): n is a, c, g, or t
  misc_feature (367)..(367): n is a, c, g, or t
  misc_feature (457)..(457): n is a, c, g, or t
caggacgcctacgacatcagccagctgcgtcacccgacagcgctgagcctgcctctgggaccgccgccacttcgcagagatgccccgcagncagcctgcacccccagccaccccgagtgctgcccaccagccccctggacatcgccgacttcatcaatgatggcttggaggctgcagatagtgaccccagtgtgccgccttacgacacagccctcatctatgactacgagggtgacggctcggtggcggggacntgagctccatcctgtccagccagggcgatgaggaccaggactacgactacctcagagactgggggccccgcttcgcccggctggcagacatgtatgggcacccgtgcgggttnggagttacggggccagatgggaccaccaggccagggagggtctttctcctggggcactgctacccagacacagaggccggacagcctgan

SEQ ID NO: 780 - DNA, 2875 bp, Artificial Sequence
  Description of Artificial sequences:primer
  misc_feature (1)..(2875): cadherin 15, m-cadherin (myotubule)(CDH15) gene.
acttgcgctgtcactcagcctggacgcgcttcttcgggtcgcgggtgcactccggcccggctcccgcctcggccccgatggacgccgcgttcctcctcgtcctcgggctgttggcccagagcctctgcctgtctttgggggttcctggatggaggaggcccaccaccctgtacccctggcgccgggcgcctgccctgagccgcgtgcggagggcctgggtcatccccccgatcagcgtatccgagaaccacaagcgtctcccctaccccctggttcagatcaagtcggacaagcagcagctgggcagcgtcatctacagcatccagggacccggcgtggatgaggagccccggggcgtcttctctatcgacaagttcacagggaaggtcttcctcaatgccatgctggaccgcgagaagactgatcgcttcaggctaagagcgtttgccctggacctgggaggatccaccctggaggaccccacggacctggagattgtagttgtggatcagaatgacaaccggccagccttcctgcaggaggcgttcactggccgcgtgctggagggtgcagtcccaggcacctatgtgaccagggcagaggccacagatgccgacgaccccgagacggacaacgcagcgctgcggttctccatcctgcagcagggcagccccgagctcttcagcatcgacgagctcacaggagagatccgcacagtgcaagtggggctggaccgcgaggtggtcgcggtgtacaatctgaccctgcaggtggcggacatgtctggagacggcctcacagccactgcctcagccatcatcacccttgatgacatcaatgacaatgcccccgagttcaccagggatgagttcttcatggaggccatagaggccgtcagcggagtggatgtgggacgcctggaagtggaggacagggacctgccaggctccccaaactgggtggccaggttcaccatcctggaaggcgaccccgatgggcagttcaccatccgcacggaccccaagaccaacgagggtgttctgtccattgtgaaggccctggactatgagagctgtgaacactacgaactcaaagtgtcggtgcagaatgaggccccgctgcaggcggctgcccttagggctgagcggggccaggccaaggtccgcgtgcatgtgcaggacaccaacgagccccccgtgttccaggagaacccacttcggaccagcctagcagagggggcacccccaggcactctggtggccaccttctctgcccgggaccctgacacagagcagctgcagaggctcagctactccaaggactacgacccggaagactggctgcaagtggacgcagccactggccggatccagacccagcacgtgctcagcccggcgtcccccttcctcaagggcggctggtacagagccatcgtcctggcccaggatgacgcctcccagccccgcaccgccaccggcaccctgtccatcgagatcctggaggtgaacgaccatgcacctgtgctggccccgccgccgccgggcagcctgtgcagcgagccacaccaaggcccaggcctcctcctgggcgccacggatgaggacctgcccccccacggggcccccttccacttccagctgagccccaggctcccagagctcggccggaactggagcctcagccaggtcaacgtgagccacgcgcgcctgcggccgcgacaccaggtccccgaaggcctgcaccgcctcagcctgctgctccgggactcggggcagccgccccagcagcgcgagcagcctctgaacgtgaccgtgtgccgctgcggcaaggacggcgtctgcctgccgggggccgcagcgctgctggcggggggcacaggcctcagcctgggcgcactggtcatcgtgctggccagcgccctcctgctgctggtgctggtcctgctcgtggcactccgggcgcggttctggaagcagtctcggggcaaggggctgctgcacggcccccaggacgaccttcgagacaatgtcctcaactacgatgagcaaggaggcggggaggaggaccaggacgcctacgacatcagccagctgcgtcacccgacagcgctgagcctgcctctgggaccgccgccacttcgcagagatgccccgcagggccgcctgcacccccagccaccccgagtgctgcccaccagccccctggacatcgccgacttcatcaatgatggcttggaggctgcagatagtgaccccagtgtgccgccttacgacacagccctcatctatgactacgagggtgacggctcggtggcggggacgctgagctccatcctgtccagccagggcgatgaggaccaggactacgactacctcagagactgggggccccgcttcgcccggctggcagacatgtatgggcacccgtgcgggttggagtacggggccagatgggaccaccaggccagggagggtctttctcctggggcactgctacccagacacagaggccggacagcctgaccctggggcgcaactggacatgccactccccggcctcgtggcagtgatggcccctgcagaggcagcctgaggtcaccgggcccgacccccctgggcctggggcagcctccttcctgtaggcgagggcccaagtctgggggcagaacctgagtgtggatggggcggccaggaagaggccccttcctgccggggtgggaagagtttctctccatcggccccatgcgggtcacctccctagtcccacctttgcctcctaccagtgaacctcatctttgtatgaaagacagcaacctcctgggtaaatctgaatgaaaaacgtgctagtctctttcatgcaaaaaaaaaaaaaaaaa

SEQ ID NO: 781 - DNA, 381 bp, Artificial Sequence
  Description of Artificial sequences:primer
  misc_feature (1)..(381): 3' terminal sequence from clone image:327740. nadh dehydrogenase (ubiquinone) 1 alpha subcomplex, 4, 9kda(NDUFA4) gene.
  misc_feature (10)..(10): n is a, c, g, or t
  misc_feature (40)..(40): n is a, c, g, or t
  misc_feature (261)..(261): n is a, c, g, or t
  misc_feature (323)..(323): n is a, c, g, or t
  misc_feature (363)..(363): n is a, c, g, or t
  misc_feature (375)..(375): n is a, c, g, or t
ggcctggtgntaggtcggttctctcctttccagtcggagnctctgccgcaaacatgctccgccagatcatcggtcaggccaagaagcatccgagcttgatccccctctttgtatttattggaactggagctactggagcaacactgtatctcttgcgtctggcattgttcaatccagatgtttgttgggacagaaataacccagagccctggaacaaactgggtcccaatgatcaatacaagttctactcaagtgaatgtngattacagcaagctgaagaaggaacgtccagatttctaaatgaatgtttcactataacgctngcttaggaatgaaggtcttccaggaaggccaaaatccggnaaaatttttccnatttaa

SEQ ID NO: 782 - DNA, 399 bp, Artificial Sequence
  Description of Artificial sequences:primer
  misc_feature (1)..(399): 5' terminal sequence from clone image:327740. nadh dehydrogenase (ubiquinone) 1 alpha subcomplex, 4, 9kda(NDUFA4) gene.
  misc_feature (232)..(232): n is a, c, g, or t
  misc_feature (252)..(252): n is a, c, g, or t
  misc_feature (257)..(257): n is a, c, g, or t
  misc_feature (273)..(273): n is a, c, g, or t
  misc_feature (284)..(284): n is a, c, g, or t
  misc_feature (325)..(325): n is a, c, g, or t
  misc_feature (335)..(335): n is a, c, g, or t
  misc_feature (352)..(352): n is a, c, g, or t
ctccaatagagattacaatagagatctccaacatgatttcatgcatttagaggagaaatatttcctggttaagtggaaaattgtgcggatgtggcttctggaagaccttcattctaaagcagcgttatagtgaaacatttcatttagaaatctggacgttccttcttcagcttgctgtaatccacattcactgagtagaacttgtattgatcattgggaccccagtttgttncaaggggctcctggggttanttctngtccccaacaaacatntgggattggancaaatggccagacgcaagaggatacaggttgttgctcccangtaagctccnagtttcccaattaaatnaccaaaggaggggggggatcaaaaggcccggggattgccttccttgg

SEQ ID NO: 783 - DNA, 140 bp, Artificial Sequence
  Description of Artificial sequences:primer
  misc_feature (1)..(140): 3' terminal sequence from clone image:328245. ran, member ras oncogene family(RAN) gene.
cacccaaggtggctacatacttcttctcaaattcaccagtcaaatgacgtttcacgaaggtcgtttttccagtaccaccatcaccaaccaatacaagtttgaactggacctggggctctccctgcgcagcatccgcggcg

SEQ ID NO: 784 - DNA, 130 bp, Artificial Sequence
  Description of Artificial sequences:primer
  misc_feature (1)..(130): 5' terminal sequence from clone image:328245. ran, member ras oncogene family(RAN) gene.
  misc_feature (7)..(7): n is a, c, g, or t
  misc_feature (31)..(31): n is a, c, g, or t
ggagacnttctaggaaggaacgccgcgatgnctgcgcagggagagccccaggtccagttcaaacttgtattggttggtgatggtggtactggaaaaacgaccttcgtgaaacgtcatttgactggtgaat

SEQ ID NO: 785 - DNA, 1656 bp, Artificial Sequence
  Description of Artificial sequences:primer
  misc_feature (1)..(1656): ran, member ras oncogene family(RAN) gene.
cgcccctgctctcgcgccggcgtcggctgcgtctccggcgtttgaattgcgcttccgccatctttccagcctcagtcggacgggcgcggaggcgcttctggaaggaacgccgcgatggctgcgcagggagagccccaggtccagttcaaacttgtattggttggtgatggtggtactggaaaaacgaccttcgtgaaacgtcatttgactggtgaatttgagaagaagtatgtagccaccttgggtgttgaggttcatcccctagtgttccacaccaacagaggacctattaagttcaatgtatgggacacagccggccaggagaaattcggtggactgagagatggctattatatccaagcccagtgtgccatcataatgtttgatgtaacatcgagagttacttacaagaatgtgcctaactggcatagagatctggtacgagtgtgtgaaaacatccccattgtgttgtgtggcaacaaagtggatattaaggacaggaaagtgaaggcgaaatccattgtcttccaccgaaagaagaatcttcagtactacgacatttctgccaaaagtaactacaactttgaaaagcccttcctctggcttgctaggaagctcattggagaccctaacttggaatttgttgccatgcctgctctcgccccaccagaagttgtcatggacccagctttggcagcacagtatgagcacgacttagaggttgctcagacaactgctctcccggatgaggatgatgacctgtgagaatgaagctggagcccagcgtcagaagtctagttttataggcagctgtcctgtgatgtcagcggtgcagcgtgtgtgccacctcattattatctagctaagcggaacatgtgctttatctgtgggatgctgaaggagatgagtgggcttcggagtgaatgtggcagtttaaaaaataacttcattgtttggacctgcatatttagctgtttggacgcagttgattccttgagtttcatatataagactgctgcagtcacatcacaatattcagtggtgaaatcttgtttgttactgtcattcccattccttttctttagaatcagaataaagttgtatttcaaatatctaagcaagtgaactcatcccttgtttataaatagcatttggaaaccactaaagtagggaagttttatgccatgttaatatttgaattgccttgcttttatcacttaatttgaaatctattgggttaatttctccctatgtttatttttgtacatttgagccatgtcacacaaactgatgatgacaggtcagcagtattctatttggttagaagggttacatggtgtaaatattagtgcagttaagctaaagcagtgtttgctccaccttcatattggctaggtagggtcacctagggaagcacttgctcaaaatctgtgacctgtcagaataaaaatgtggtttgtacatatcaaatagatattttaagggtaatattttcttttatggcaaaagtaatcatgttttaatgtagaacctcaaacaggatggaacatcagtggatggcaggaggttgggaattcttgctgttaaaaataattacaaattttgcactttttgtttgaatgttagatgcttagtgtgaagttgatacgcaagccg

SEQ ID NO: 786 - DNA, 327 bp, Artificial Sequence
  Description of Artificial sequences:primer
  misc_feature (1)..(327): 3' terminal sequence from clone image:328591. pancreatic lipase-related protein 1(PNLIPRP1) gene.
acagatgcaccagtggattttattagtgtgaacgcagcagcctcgtcgccccgggagcttagcagggcgtcgagggtgagcagcgtgtcttcccgcactgtgtcttcgctacagaagttgtacactgtcttctcttctcccttttgcacagtgatcttggtggcacccactttggggagggttggatttatcacattgttattccaaagaaacttgactttctcaattgttccaacatccagctttgcatcaaactcataggaatgggttgagcctggtttgagaatccccctgaagatgctgtactggtgagtgtttcccttattt

SEQ ID NO: 787 - DNA, 389 bp, Artificial Sequence
  Description of Artificial sequences:primer
  misc_feature (1)..(389): 5' terminal sequence from clone image:328591. pancreatic lipase-related protein 1(PNLIPRP1) gene.
  misc_feature (7)..(7): n is a, c, g, or t
  misc_feature (13)..(13): n is a, c, g, or t
  misc_feature (262)..(262): n is a, c, g, or t
tcgcatntcgctntcatagacaaaggagatgagagctgggtgacagacatgtgcaagaaactgttcgaggtggaggaggtgaactgcatctgcgtggactggaagaagggctcccaagccacctacacacaggctgccaacaacgtgcgagtggtgggcgcccaggtggcccagatgctcgacatcctcttgacagagtatagctaccccccttccaaagttcacctcattggccacagcctgggagcccacgtggctggangaggcaggaagcaagactccaggcctgagcaaggattacaagggttggatcctgtagaagcaagtttcgagagtactcctgaagaggtgcgactttgatccctctgatgctgactttgttgatgtga

SEQ ID NO: 788 - DNA, 1481 bp, Artificial Sequence
  Description of Artificial sequences:primer
  misc_feature (1)..(1481): pancreatic lipase-related protein 1(PNLIPRP1) gene.
ctctggaacattagacaggatgctgatcttctggacaatcacacttttcctgctgggagcagccaaaggaaaagaagtttgctatgaggacctcgggtgcttttctgacactgagccctggggcgggacagcaatcaggcccctgaaaattctcccctggagccctgagaagatcggcacccgcttcctgctgtacaccaatgaaaacccaaacaactttcaaattctcctcctctctgatccatcaacaattgaggcatcaaattttcaaatggacagaaagacccggttcatcatccatggcttcatagacaaaggagatgagagctgggtgacagacatgtgcaagaaactgttcgaggtggaggaggtgaactgcatctgcgtggactggaagaagggctcccaagccacctacacacaggctgccaacaacgtgcgagtggtgggcgcccaggtggcccagatgctcgacatcctcttgacagagtatagctaccccccttccaaagttcacctcattggccacagcctgggagcccacgtggctggagaggcaggaagcaagactccaggcctgagcaggattacagggttggatcctgtagaagcaagtttcgagagtactcctgaagaggtgcgacttgatccctctgatgctgactttgttgatgtgattcacacggatgcagctcccctgatcccattcttgggttttggaacgaaccaacagatgggtcatcttgacttcttccccaatggaggagagagcatgccgggatgcaagaagaatgccctgtctcagatcgtggatctagatggcatctgggcgggaacccgggactttgtggcttgcaatcacctaagaagctacaagtattacttggaaagcatcctcaatcccgatgggtttgctgcatatccctgcacttcctacaagtcctttgagtctgacaagtgcttcccgtgtccagatcaaggatgcccacagatgggtcactatgctgataaatttgctggcaggacaagtgaagagcagcagaaattcttcttgaacacaggagaggctagcaatttcgctcgctggagatatggggtttccatcacactgtctggaagaacagccactggtcagatcaaagttgctttgtttggaaataagggaaacactcaccagtacagcatcttcagggggattctcaaaccaggctcaacccattcctatgagtttgatgcaaagctggatgttggaacaattgagaaagtcaagtttctttggaataacaatgtgataaatccaaccctccccaaagtgggtgccaccaagatcactgtgcaaaagggagaagagaagacagtgtacaacttctgtagcgaagacacagtgcgggaagacacgctgctcaccctcacgccctgctaagctcccggggcgacgaggctgctgcgttcacactaataaaatccactggtgcatctgt

SEQ ID NO: 789 - DNA, 281 bp, Artificial Sequence
  Description of Artificial sequences:primer
  misc_feature (1)..(281): 3' terminal sequence from clone image:33005. cap, adenylate cyclase-associated protein, 2 (yeast)(CAP2) gene.
ttttttttttcatcacagtatttaaacaattaggaattttactttatttcagaataagtttacagttgaaaaatgattatttactaaagccacattattcatacagacaaaacttttatagcaaaaccttggtacatgagcattaataatttgaatactatatggatatagaagatatttaaaaaatggaaacaatgtattccaaaggctgtaagaggcacaatatatatgcttgtactgggcctgcaaggcattatactataattcattaaatatgatcc

SEQ ID NO: 790 - DNA, 421 bp, Artificial Sequence
  Description of Artificial sequences:primer
  misc_feature (1)..(421): 5' terminal sequence from clone image:33005. cap, adenylate cyclase-associated protein, 2 (yeast)(CAP2) gene.
  misc_feature (283)..(283): n is a, c, g, or t
  misc_feature (349)..(349): n is a, c, g, or t
  misc_feature (359)..(359): n is a, c, g, or t
  misc_feature (391)..(391): n is a, c, g, or t
  misc_feature (402)..(402): n is a, c, g, or t
  misc_feature (418)..(418): n is a, c, g, or t
ccaagaggacaggaatgaccttgtgatttcagagactgagctgaaacaagtggcttacattttcaaatgcgaaaaatcaactattcagataaaagggaaagtaaactccattataattgacaactgtaagaaactcggcctggtgtttgacaatgtggtgggcattgtggaagtgatcaactcccaggacattcaaatccaggtaatggggagagtgccaacaatttccatttaataagacagaaggttgccacatatacctcagtgaagatgcattagactntgagatcgtgagcgccaagtcatcttgaaatggaacatactttttccctcaggatgggtgattatnggagattttnccctttccttgaacagtttcaaggacaggctngggatggggtncccagtttattcactngag

SEQ ID NO: 791 - DNA, 1517 bp, Artificial Sequence
  Description of Artificial sequences:primer
  misc_feature (1)..(1517): cap, adenylate cyclase-associated protein, 2 (yeast)(CAP2) gene.
attctttggggaggcaactaggatggtgtggccgaccacggatttgcattgccgaggacgggaccccagggcagcgaagcagaatggccaacatgcagggactggtggaaagactggaacgagctgtcagccgcctggagtcgctgtctgcagagtcccacaggccccctgggaactgcggggaagtcaatggtgtcattgcaggtgtggcaccctccgtggaagcctttgacaagctgatggacagtatggtggccgagtttttaaagaacagtaggatccttgctggggacgtggagacccatgcagaaatggtgcacagtgctttccaggcccagcgggctttccttctgatggcctctcagtaccaacaaccccacgagaatgacgtggccgcacttctgaaacccatatcggaaaagattcaggaaatccaaactttcagagagagaaaccgggggagtaacatgtttaatcatctttcggccgtcagcgaaagcatccctgcccttggatggatagctgtgtctcccaaacctggtccttatgtcaaggagatgaatgacgctgccaccttttacactaacagggtcttaaaggactacaaacacagtgatttgcgtcatgtggattgggtgaagtcatatttgaacatttggagtgaacttcaagcatacatcaaggaacaccacaccacgggcctcacatggagcaaaacaggtcctgtagcatccacagtatcagcgttttctgtcctctcctctgggcctggccttcctccaccccctcctcctctgcctcctccagggccacctccacttttcgagaatgaaggcaaaaaagaggaatcttctccttcacgctcagctttatttgcccaacttaaccagggagaagcaattacaaaagggctccgccatgtcacagatgaccagaagacatacaaaaatcccagcctgcgggctcaaggagggcaaactcaatctcccaccaaaagtcacactccaagtcccacatctcctaaatcttatccttctcaaaaacatgccccagtgttggagttggaaggaaagaaatggagagtggagtaccaagaggacaggaatgaccttgtgatttcagagactgagctgaaacaagtggcttacattttcaaatgcgaaaaatcaactattcagataaaagggaaagtaaactccattataattgacaactgtaagaaactcggcctggtgtttgacaatgtggtgggcattgtggaagtgatcaactcccaggacattcaaatccaggtaatggggagagtgccaacaatttccattaataagacagaaggttgccacatatacctcagtgaagatgcattagactgtgagatcgtgagcgccaagtcatctgaaatgaacatacttatccctcaggatggtgattatagagaatttcccattcctgaacagttcaagacagcatgggatggatccaagttaatcactgaacctgcagaaattatggcctaa

SEQ ID NO: 792 - DNA, 426 bp, Artificial Sequence
  Description of Artificial sequences:primer
  misc_feature (1)..(426): 5' terminal sequence from clone image:33722. nedd4 family interacting protein 2(NDFIP2) gene.
  misc_feature (213)..(213): n is a, c, g, or t
  misc_feature (374)..(374): n is a, c, g, or t
  misc_feature (386)..(386): n is a, c, g, or t
  misc_feature (400)..(400): n is a, c, g, or t
  misc_feature (411)..(411): n is a, c, g, or t
  misc_feature (422)..(422): n is a, c, g, or t
tttcatattaatttcttatagacctgtactttattctttcaataatttttaaatgaaattaagctttgctacatggtaattaaataattactaggaagcttagctatcaaacatcgacttactaaaatttcattttagcttttatggtatatgtgcttgttttctgaatatggatacatgttatttttgatccagcatcaaaacttcactttncgttttgacttttccccccaaatctgtaaggttcaagtatacatattactgaatcctctataattgggcataattcaatggtagccttaaatctcatcatgtaaggcaggggaatcagaatgttattttcaaggaacttgaatgttcccttcaggtgtatnaaaatcctggcntactttcaattccngtgaggcttgnaacagctggcngttt

SEQ ID NO: 793 - DNA, 446 bp, Artificial Sequence
  Description of Artificial sequences:primer
  misc_feature (1)..(446): 3' terminal sequence from clone image:33794. atp synthase, h+ transporting, mitochondrial f1 complex, gamma polypeptide 1(ATP5C1) gene.
  misc_feature (421)..(421): n is a, c, g, or t
tttttttttttattttaagttgtttattttaagataatttacaaatatcttgctgtcttcagtaattcaaataatggaggaacagtttcttcggacaaaggcagcagtaagctaaaaacaaaatcaactggctgaattttccttctttacctcttgtctgaggatggaacttgattttcattaatccagaggctgcagcaccagaggataatttcaatcaactcttttgtgatgacagcttggcgggtacgggttgaatgtcaatgtcaatttgtcaatcatctcaggaaggcattcttgctgggcattgtccagggctgttcatccgggggactctgcttcactagtgggtgggacttccttcagaggagtaggtaggatggatgttgggcccagaattgtattcttggggaattttgcnggcacgttcagcatccatttcgtcc

SEQ ID NO: 794 - DNA, 470 bp, Artificial Sequence
  Description of Artificial sequences:primer
  misc_feature (1)..(470): 5' terminal sequence from clone image:33794. atp synthase, h+ transporting, mitochondrial f1 complex, gamma polypeptide 1(ATP5C1) gene.
  misc_feature (382)..(382): n is a, c, g, or t
  misc_feature (389)..(389): n is a, c, g, or t
  misc_feature (394)..(394): n is a, c, g, or t
  misc_feature (413)..(413): n is a, c, g, or t
  misc_feature (427)..(427): n is a, c, g, or t
  misc_feature (443)..(443): n is a, c, g, or t
  misc_feature (451)..(451): n is a, c, g, or t
  misc_feature (463)..(463): n is a, c, g, or t
cagggctgtggctaccatgttctctcgcgcgggtgtcgctgggctgtcggctggaccttgcagccgcaatggattcaagttcgaaatatggcaactttgaaagatatcaccaggagactaaagtccatcaaaaacatccagaaaattaccaagtctatgaaaatggtagcggcaaaaatatgcccgagctgagagagagctgaaaccagctcgaatatatggattgggatctttagctctgtatgaaaaagctgatatcaaggggcctgaagacaagaaggaaacacctccttattgggtgtgtcctcagatcgagggactgtgtgggtgctatttcattcctccattggctaaacagatggaaaagcgaggtttgctacantaacagncagcngggggaaagaagttatggnttgtttgggatttnggtggacaaattcagngggcttanttttttagggantcttttt

SEQ ID NO: 795 - DNA, 448 bp, Artificial Sequence
  Description of Artificial sequences:primer
  misc_feature (1)..(448): 3' terminal sequence from clone image:340995. atpase, cu++ transporting, alpha polypeptide (menkes syndrome)(ATP7A) gene.
  misc_feature (49)..(49): n is a, c, g, or t
tgattccaggaatgtctttattctttttaaaataaccagtaaccagatngcctcacccagagaaaaaaacaaaatggagtaaaataaatatcaagaaaaatcattttaaagcatgatccataagtaatagaaaaaattctcttaacatacatttttcgattttaagctgtatacagaaaagatatgcgcacttaaagttttggaaacatcttgtctacagtgctattttaagcattctatacatatgaataaagaatactttttaaaaaattaaagcacaatataaaattacttgttcacaaggcatcaaatttgacattctaaaattgatactaaactaggaaaaataacgtttctattttcacaaatgacacaccatacatcttgagactacaatactactactctagctgtgttttaatctttgaaattcaaaaggcatctttgg

SEQ ID NO: 796 - DNA, 414 bp, Artificial Sequence
  Description of Artificial sequences:primer
  misc_feature (1)..(414): 5' terminal sequence from clone image:340995. atpase, cu++ transporting, alpha polypeptide (menkes syndrome)(ATP7A) gene.
cattaccagaagcaaagctgctgctaacccaacatctggcacataggatttgtactcggtaaatgttagttcttttctccccttgaggtcagtaataaatacaaaaaaatcatttttctagagcagagtcttaaaatcaggtgggggtaggggatggagttcttcctttcctaccccttttctcttttatcctttcatatatacacacgcaaagtttacaaccttattccatgctgtctttcagatttagaaaagatctaactttctgtctcagctgtcttaaagagagaactgaagcttttgatgaaggtgctattaatctagaaaggcaaacccatttcactgaaatatcaatgggtttgcatatctaggccctttttttagaccaatgcctatgccatcctccatggcttt

SEQ ID NO: 797 - DNA, 8478 bp, Artificial Sequence
  Description of Artificial sequences:primer
  misc_feature (1)..(8478): atpase, cu++ transporting, alpha polypeptide (menkes syndrome)(ATP7A) gene.
gccgcagccgcagctactgtgacttctccgattgtgtgagctttgttggagcctgcgtacgtggatttatcgctgccacggtctgcgtagttccagaggtttaaccataggatagagaaaccaggaatgtaatgaggaaatcaaaatggatccaagtatgggtgtgaattctgttaccatttctgttgagggtatgacttgcaattcctgtgtttggaccattgagcagcagattggaaaagtgaatggtgtgcatcacattaaggtatcactggaagaaaaaaatgcaactattatttatgaccctaaactacagactccaaagaccctacaggaagctattgatgacatgggctttgatgctgttatccataatcctgaccctctccctgttttaactgacaccttgtttctgactgttacggcgtcactgactttgccatgggaccatatccaaagcacattgctgaagaccaagggtgtgacagacattaaaatttaccctcagaaaagaactgtagcagtgacaataatcccttctatagtgaatgccaatcagataaaagagctggttccagaactcagtttagatactgggacactggagaaaaagtcaggagcttgtgaagatcatagtatggctcaagctggtgaagtcgtgctgaagatgaaagtggaagggatgacctgccattcatgtactagcactattgaaggaaaaattgggaaactgcaaggtgttcagcgaattaaagtctccctggacaatcaagaagctactattgtttatcaacctcatcttatctcagtagaggaaatgaaaaagcagattgaagctatgggctttccagcatttgtcaaaaagcagcccaagtacctcaaattgggagctattgatgtagaacgtctaaagaacacaccagttaaatcctcagaagggtcacagcaaaggagtccatcatataccaatgattcaacagccactttcatcattgatggcatgcattgtaaatcatgtgtgtcaaatattgaaagtactttatctgcactccaatatgtaagcagcatagtagtttctttagagaataggtctgccattgtgaagtataatgcaagctcagtcactccagaatccctgagaaaagcaatagtggctgtatcaccggggctatatagagttagtatcacaagtgaagttgagagtacctcaaactctccctccagctcatctcttcagaagattcctttgaatgtagttagccagcctctgacacaagaaactgtgataaacattgatggcatgacttgtaattcctgtgtgcagtctattgagggtgtcatatcaaaaaagccaggtgtaaaatccatacgagtctcccttgcaaatagcaatgggactgttgagtatgatcctctactaacctctccagaaacgttgagaggagcaatagaagacatgggatttgatgctaccttgtcagacacgaatgagccgttggtagtaatagctcagccttcatcggaaatgccgcttctgacttcaactaatgaattttatactaaagggatgacaccagttcaagacaaggaggaaggaaagaattcatctaagtgttacatacaggtcactggcatgacttgcgcttcctgtgtagcaaacattgaacggaatttaaggcgggaagaaggaatatattctatacttgtggccctgatggctggcaaggcagaagtaaggtataatcctgctgttatacaacccccaatgatagcagagttcatccgagaacttggatttggagccactgtgatagaaaatgctgatgaaggagatggtgttttggaacttgttgtgaggggaatgacgtgtgcctcctgcgtacataaaatagagtctagtctcacaaaacacagagggatcctatactgctccgtggccctggcaaccaacaaagcacatattaaatatgacccagaaattattggtcctagagatattatccatacaattgaaagcttaggttttgaagcttctttggtcaagaaggatcggtcagcaagtcacttagatcataaacgagaaataagacaatggagacggtcttttcttgtgagtctgtttttctgtattcctgtaatggggctgatgacatatatgatggttatggaccaccactttgcaactcttcaccataatcaaaacatgagtaaagaagaaatgatcaaccttcattcttctatgttcctggagcgccagattcttccaggattgtctgttatgaatttgctgtcctttttattgtgtgtacctgtacagtttttcggaggctggtacttctacattcaggcttataaagcactgaagcataagacagcaaatatggacgtactgattgtgctggcaaccaccattgcatttgcctactctttgattattcttctagttgcaatgtatgagagagccaaagtgaaccctattactttctttgacacaccccctatgctgtttgtgtttattgcactaggccgatggctggaacatatagcaaagggcaaaacatcagaggctcttgcaaagttaatttcactacaagctacagaagcaactattgtaactcttgattctgataatatcctcctcagtgaagaacaagtggatgtggaacttgtacaacgtggagatatcattaaagtagttccaggaggcaaatttccagtggatggtcgtgttattgaaggacattctatggtagatgagtccctcatcacaggggaggcaatgcctgtggctaagaaacctggcagcacagtgattgctggttccattaaccagaacgggtcactgcttatctgcgcaacacatgttggagcagacacaaccctttctcaaattgtcaaacttgtggaagaggcacaaacatcaaaggctcctatccagcagtttgcagacaaactcagtggctattttgttccttttattgtttttgtttccattgccaccctcttggtatggattgtaattggatttctgaattttgaaattgtggaaacctactttcctggctacaatagaagtatctcccgaacagaaacgataatacgatttgctttccaagcctctatcacagttctgtgtattgcatgtccctgttcactgggactggccactccaactgctgtgatggtgggtacaggagtaggtgctcaaaatggcatactaataaaaggtggagagccattggagatggctcataaggtaaaggtagtggtatttgataagactggaaccattactcacggaaccccagtggtgaatcaagtaaaggttctaactgaaagtaacagaatatcacaccataaaatcttggccattgtgggaactgctgaaagtaacagtgaacaccctctaggaacagccataaccaaatattgcaaacaggagctggacactgaaaccttgggtacctgcatagatttccaggttgtgccaggctgtggtattagctgtaaagtcaccaatattgaaggcttgctacataagaataactggaatatagaggacaataatattaaaaatgcatccctggttcaaattgatgccagtaatgaacagtcatcaacttcgtcttccatgattattgatgcccagatctcaaatgctcttaatgctcagcagcataaagtcctcattggtaaccgggagtggatgattagaaatggtcttgtcattaataacgatgtaaatgatttcatgactgaacatgagagaaaaggtcggactgctgtattagtagcagttgatgatgagctgtgtggcttgatagccattgcagacacagtgaagcctgaagcagaactggctatccatattctgaaatctatgggcttagaagtagttctgatgactggagacaacagtaaaacagctagatctattgcttctcaggttggcattactaaggtgtttgctgaagttctaccttctcacaaggttgctaaagtgaagcaacttcaagaggaggggaaacgggtagcaatggtgggagatggaatcaatgactccccagctctggcaatggctaatgtgggaattgctattggcacaggcacagatgtagccattgaagcagctgatgtggttttgataaggaatgatcttctggatgtagtggcaagtattgacttatcaagaaagacagtcaagaggattcggataaattttgtctttgctctaatttataatctggttggaattcccatagctgctggagtttttatgcccattggtttggttttgcagccctggatgggatctgcagcaatggctgcttcatctgtttctgtagtactttcttctctcttccttaaactttacaggaaaccaacttacgagagttatgaactgcctgcccggagccagataggacagaagagtccttcagaaatcagcgttcatgttggaatagatgatacctcaaggaattctcctaaactgggtttgctggaccggattgttaattatagcagagcctctataaactcactactgtctgataaacgctccctaaacagtgttgttaccagtgaacctgacaagcactcactcctggtgggagacttcagggaagatgatgacactgcattataaaaggccatggagagtgctgccagtttaacttgtcatgcactgacacagcattcatgatgttaccttcacttttcaaaatattgtagaaggatttttctcatgctcttatattagggattctatttgagttgcgtttatctgttggcaaaaatatctttttcaaggcatcagctctgaacctagctttatttaaactgaatttccagtatatttttgttttttcactaacaacagataaggtagagcagtgaggtttacaacaagccctacaattagagattgctgaactgctgctaaagtgattttttttttatttgaccaaaaaaaaaaaggcccaagaagaagaaaatgaaaaatttgaagatttgagagcatgaagatattcatgcttttgaactcaaaatattgaagatactctcaagcctgtatccctgcccactggggagcaatgactttcaaagcactgtgtataaaacatctagttttagaagggaaacagttgaaactgtttaaaaatagatgtgccttatttattgcaggctttctttcccccattctccctgcatccttgtccttgcaggtgcttttttagatgctccaatatgtcttcttttgttattttctttcgagctaaccagtttagggtggtttttcattgattaaaaataactgacaactgttctaatattttgctcctttttaaattttgtagctcaaaagaccttaaaggtctgtagggttccctgcctcccatctttccactgttgtaaaaagtatatcaaattattccttcaagtttcctagctctgtgctcagtttcagttcactcctgccaagttggactctaagttattcttcatgtagtctgctgatctcagtctggaaacttaacattatgagccttttctgctcaaaaaattttcaaagattaaaactattatacatatacaggtcatataaaattacctggattcactaaatttgtttgttgttgttgttgttgttgttgttgttgttgagacagagtcttgttttgcagcccaggctggagtgcagtggcaccatcttggctcactgcaacctctgcctaccggattcaaggaattctccctgcctcagcctcctgagtagctaggattacaggtgcctgccaccacacccggctaattttcatatttttcagtagagacggggtttcgccatgttggctagcctggtcttaaactcctaacctcaggtgatccacccgccttggcctcccaaagtgctgggattacaggtgtgagcctccatgcccagcctaaatttgtattttttgaattgagtataacactttgctagtatatataatttaatagattttatttatctttttagtgtttcagataacctctcaaaaagactttaaaataatgctattacacaaaagctgcatttaccaaaaaatacaagtaaaatcataatacagaaactaaaatttccctaggttatgacgctttttagctaaatatatactcttctctagtttaaaacatttgaacttgcctagttagtgtggttggcaaatttaggagcttgttcccattgccaaatggatttagaaattcccttgtgagtgcctggtagctaatacactggtcagagatctggtacttgtaagactatttaaatttctttgttagttgcaagatggatttcatatgcagaatatgtaaatgaagaggactcataagtaaattcctaacattttgttcccattaccagaagcaaagctgctgctaacccaacatctggcacataggatttgtactcggtaaatgttagttcttttctccccttgaggtcagtaataaatacaaaaaaaaaatcatttttctagagcagagtcttaaaatcaggtgggggtaggggatggacttcttcctttcctaccccttttctcttttatcctttcatatatacacatgcaaagtttacaaccttattccatgctgtctttcagatttagaaaagatctaatttctgtctcagctgtcttaaagagagatccaagcttttgatgaaggtgctattaatctagaaaggcaaacccatttcactgaaatatcaatgggtttgcatatctaggccctttttttagaccaatgcctatgccatcctccatgctttcagtttgagttttattatttattattttaattccagtggcccatcttataatacaacttgtttcttctagaagacagagctgatagggtaaatgttgaaaaaagaagcatgcctccttctccctcccacccacctcaagcagttgaacacagccagttattcttccattattatgtgtaccttggagtcatcctcttggtcttgtattcatattgtgggacagtgggaatagcagcttgtagtattgaaataatcaaagagataatttcagctcttacaacaagaacagaaaacatgctaattagaaaaagtcctgctttaagtaatatgtagccacatttgaatcctctaccacaagtctttttggcaatcttgaactttcattagcttcaaagagaagctgtctttacaggagaaagaggtgattatggagggaatcaaaattactgctttcagctagtagctagcttttagtcaggagttagtaatgagaaattttataaatgtgtatttctgtgtattcacatacatatatatatacacacatatatatgtacatacacatacatacatattaccatactgaagggaaatggatttatatttgaatttgatatttgaatatttgaagttctctatttatatttcatttatcactcttctgtattcactcagcaaccatgcccttagtctgaagataacaaggatactttaatatccagtgccggttcagactcacctatgtggcaccttaaacttaaatatccaaagagcccttttgaatttcaaagattaaaacacagctagagtagtagtattgtagtctcaagatgtatggtgtgtcatttgtgaaaatagaaacgttatttttcctagtttagtatcaacattttagaatgtcaaatttgatgccttgtgaacaagtaattttatattgtgctttaattttttaaaaagtattctttattcatatgtatagaatgcttaaaatagcactgtagacaagatgtttccaaaactttaagtgcgcatatcttttctgtatacaggcttaaaatcaaaaatgtatgttaagagaattttttctattacttatggatcatgctttaaaatgatttttcttgatatttattttactccattttgtttttttctctgggtgaggcatctggttactggttattttaaaaagaataaagacattcctggaatcactccttttgggtttttgtttgttttgtttcttttctacatttttaagtattattttacaaaatagaaaaaatatagattcatgccaaattattacctatttttacactaactttctgcagtccctccatctggtatgagtaaccagatagagcacaagcatgagttcttgttcttcagttaaaagagcttctttcacagtgttgataacaaatgccttttgtagccaaaaccaggcgtctcaaccttacgtttttagttaaagaaatgtttagctaaacgctgttgaacattgattgtttggtaccgaaaacagcagtggacgatgttgtgcaatatccatctactgtagttaagatattcagtagtttgtttttcataagcatgtaattgatcatatttctgccaaggatgtgccttcaactttataattatagtgttgtaaaata

SEQ ID NO: 798 - DNA, 410 bp, Artificial Sequence
  Description of Artificial sequences:primer
  misc_feature (1)..(410): 3' terminal sequence from clone image:341121. atpase, h+ transporting, lysosomal 21kda, v0 subunit c''(ATP6V0B) gene.
  misc_feature (371)..(371): n is a, c, g, or t
gacccagacaaataccaagtttatttcacaaacactaggaagatgggttgagggtggaggtgggggacacaggtgcgcactgcacagagtcagcagcagcagcctgctccccgcactgaggactcggcctggactgcagtgcctccaaatcaacacgcagcaagaggggagtgcagggagggccctgaacaccaagcctctgaaaggctaagggacacagctccagctgtcccatggaaaaccagcaataaataaaagtgacggcacggccccacccacacatatcatctagtcacccatcttcactctggaggtctgcaaaaaaagaacaggagaaatcaggcagggacagaggaataggtaaggcagtnacaaatgatagaagatgacatctagcacatggttggatg

SEQ ID NO: 799 - DNA, 441 bp, Artificial Sequence
  Description of Artificial sequences:primer
  misc_feature (1)..(441): 5' terminal sequence from clone image:341121. atpase, h+ transporting, lysosomal 21kda, v0 subunit c''(ATP6V0B) gene.
atctgccatgcttttcatgtctccagtctgtatttgtgatctagactagaatggaattttgtctgtctatatcagtctgtcatggtgtgtttgactgtctctcggagctatgtgtatctccctctcacatgcctgtcagtaggacaccattgtctaaattgtgtgtgtctagtctgtctgacagtgtgtgagtttgtgactaaggatcagcctgagggtctgagtgtgactgtgggtgcttgactgagttgattcttagtgactagctttatccatatgccacttctctccgtctgtcccacagcgtaactctgtggttgtctgtccctgtctgccttgtctgtcacagtgtgtccatcctggttagtcatatatctcttgtggtctgtccatccaaccatgtgctagatgtcatcttctatcatttgtcactgccttagg

SEQ ID NO: 800 - DNA, 1007 bp, Artificial Sequence
  Description of Artificial sequences:primer
  misc_feature (1)..(1007): atpase, h+ transporting, lysosomal 21kda, v0 subunit c''(ATP6V0B) gene.
gacgctgcggggcgggcggacagactgcgggacggacggtggacgctgggacgcgtttgtagctccggccccgccgttccgacccccgccgccgtcgccgccatgacggggctagcactgctctactccggggtcttcgtggccttctgggcctgcgcgctggccgtgggagtctgctacaccatttttgatttgggcttccgctttgatgtggcatggttcctgacggagacttcgcccttcatgtggtccaacctgggcattggcctagctatctccctgtctgtggttggggcagcctggggcatctatattaccggctcctccatcattggtggaggagtgaaggcccccaggatcaagaccaagaacctggtcagcatcatcttctgtgaggctgtggccatctacggcatcatcatggcaattgtcattagcaacatggctgagcctttcagtgccacagaccccaaggccatcggccatcggaactaccatgcaggctactccatgtttggggctggcctcaccgtaggcctgtctaacctcttctgtggagtctgcgtgggcatcgtgggcagtggggctgccctggccgatgctcagaaccccagcctctttgtaaagattctcatcgtggagatctttggcagcgccattggcctctttggggtcatcgtcgcaattcttcagacctccagagtgaagatgggtgactagatgatatgtgtgggtggggccgtgcctcacttttatttattgctggttttcctgggacagctggagctgtgtcccttagcctttcagaggcttggtgttcagggccctccctgcactcccctcttgctgcgtgttgatttggaggcactgcagtccaggccgagtcctcagtgcggggagcaggctgctgctgctgactctgtgcagctgcgcacctgtgtcccccacctccaccctcaacccatcttcctagtgtttgtgaaataaacttggtatttgtctgggtc

SEQ ID NO: 801 - DNA, 530 bp, Artificial Sequence
  Description of Artificial sequences:primer
  misc_feature (1)..(530): 3' terminal sequence from clone image:341699. defender against cell death 1(DAD1) gene.
ttttttttttttttttttttgaggagtggcatggagttctttaatttggaaggcaaaaggttacatttaatgaaaggcagaggctggattaataaatgtttgttagaaagttgttctgacacacagtgaactctgggcttttctcctgcataaaaagcagagtagcagtaagtgcaaatctgaagaaaatccatgtgtccaataagctgccatctccagaactcttatccaggaaattcaaagagtgaacattcttttagtctcctactcctcaattaagtaaatgagaatgattcagccaacaaagttcatgacaacaaggtgcaggatggtgctggcaaagagaaaatcagcaaaggctcgctctggggagatgccttggaaatccgctttgttctgtgggttgatctgtattctcaggcaaaccgctagatgaaactccccacacaagagatgaagcccgaggagaaaaagagttgaaggggaaggtccccacgagggggacagtaaccggactggcagcgccccgg

SEQ ID NO: 802 - DNA, 544 bp, Artificial Sequence
  Description of Artificial sequences:primer
  misc_feature (1)..(544): 5' terminal sequence from clone image:341699. defender against cell death 1(DAD1) gene.
  misc_feature (375)..(375): n is a, c, g, or t
  misc_feature (416)..(416): n is a, c, g, or t
  misc_feature (471)..(471): n is a, c, g, or t
  misc_feature (499)..(499): n is a, c, g, or t
  misc_feature (517)..(517): n is a, c, g, or t
atccggtgtggtcgacgggtcctccaagagtttggggcgcggaccggagtaccttgcgtgcagttatgtcggcgtcggtagtgtctgtcatttcgcggttcttagaagagtacttgagctccactccgcagcgtctgaagttgctggacgcgtacctgctgtatatactgctgaccggggcgctgcagttcggttactgtctcctcgtggggaccttccccttcaactcttttctctcgggcttcatctcttgtgtggggaagtttcatcctagcggtttgcctgagaatacagatcaacccacagaacaaagcggatttcaaggcatctccccagagcgagcctttgctgattttctctttgccaagcaccatnctgcaccttggttgtcatgaactttgttgggctgaatcatnctcatttacttaattgaaggagtaggagactaaaagaatgttcactcctttgaanttcctggataagagttctggagatgggnagcttaattggacacatngaattttctccagatttgaacttaatg

SEQ ID NO: 803 - DNA, 699 bp, Artificial Sequence
  Description of Artificial sequences:primer
  misc_feature (1)..(699): defender against cell death 1(DAD1) gene.
catccggtgtggtcgacgggtcctccaagagtttggggcgcggaccggagtaccttgcgtgcagttatgtcggcgtcggtagtgtctgtcatttcgcggttcttagaagagtacttgagctccactccgcagcgtctgaagttgctggacgcgtacctgctgtatatactgctgaccggggcgctgcagttcggttactgtctcctcgtggggaccttccccttcaactcttttctctcgggcttcatctcttgtgtggggagtttcatcctagcggtttgcctgagaatacagatcaacccacagaacaaagcggatttccaaggcatctccccagagcgagcctttgctgattttctctttgccagcaccatcctgcaccttgttgtcatgaactttgttggctgaatcattctcatttacttaattgaggagtaggagactaaaagaatgttcactctttgaatttcctggataagagttctggagatggcagcttattggacacatggattttcttcagatttgacacttactgctagctctgctttttatgacaggagaaaagcccagagttcactgtgtgtcagaacaactttctaacaaacatttattaatccagcctctgcctttcattaaatgtaaccttttgctttccaaattaaagaactccatgccactcctcaaaaaaaaaaaaaa

SEQ ID NO: 804 - DNA, 547 bp, Artificial Sequence
  Description of Artificial sequences:primer
  misc_feature (1)..(547): 3' terminal sequence from clone image:341834. loc349507.
  misc_feature (483)..(483): n is a, c, g, or t
  misc_feature (521)..(521): n is a, c, g, or t
ccttttaaaaaaaaaacttttattttaggttcagggatacatgtataggtttgttataaagataaactcgtgttattctgaaaagacttccatttgcagacatcgctgctgcccagaactccctgccaccagccatggccaaccccactgtgttcttcaacattgcaattgatagtgagtccttgggctgcatctccttcaagctatttgcagacaaagttctaaagatggaagaaaatttttgtgctctgaacactggagagaaagtatttggtgataaaggtccctgcttttacagaattattccggggtgtgtgtcagggtggtgacttcacacaccataatggcactggtggcaagtccctctacagcaaggaatttgatgatgagaacttcatcctaagcatacagctcctggcgtcttgtccacggcaaatgctggacccaccacaaatgggtcccagtttttcatctgtactgccnagacagaggatgggatgacagcatgtgggcctttggcnaggtgaaagatggcatgcctcgtgcc

SEQ ID NO: 805 - DNA, 485 bp, Artificial Sequence
  Description of Artificial sequences:primer
  misc_feature (1)..(485): 5' terminal sequence from clone image:341834. loc349507.
  misc_feature (441)..(441): n is a, c, g, or t
  misc_feature (470)..(470): n is a, c, g, or t
  misc_feature (476)..(476): n is a, c, g, or t
catgccatctttcaccttgccaaagaccacatgctgtcatccatcctctgtcttggcagtacagatgaaaaactgggaaccatttgtggtgggtccagcatttgccgtggacaagacgccaggagctgtatgcttaggatgaagttctcatcatcaaattccttgctgtagagggacttgccaccagtgccattatggtgtgtgaagtcaccaccctgacacacaccccggaataattctgtaaaagcagggacctttatcaccaaatactttctctccagtgttcagagcacaaaaattttcttccatctttagaactttgtctgcaaatagcttgaaggaagatgcagcccaaggactcactatcaattgcaatgttgaagaacacagtgggggttggccatggctgggtggcaggaagttttgggcagaagcaatttntgcaaatggaagcctttccgaatacacgngttttncttattaca

SEQ ID NO: 806 - DNA, 447 bp, Artificial Sequence
  Description of Artificial sequences:primer
  misc_feature (1)..(447): 3' terminal sequence from clone image:341984.
  misc_feature (78)..(78): n is a, c, g, or t
  misc_feature (254)..(254): n is a, c, g, or t
tttttttttttttttttttttaaatggaagcattaaacaaaacaaaagaacaaatgtattgcaattggcgtgacgacntcggggggaaaataaactcttccccccagatggcatgagacagttgcggcgcggcctcccacctctcccacatgcggggcaggctactggtcgtgtgggattgtgatggcgacgtccacgccagcgtcaatagggaaggatgtaatcttcttcacaagctccgtcggcgcgcggantctacaagacgcttgtagatcttcagctcgtaagtgtcccacgtgttggtgccgttaccgcacggcgtttttgcgggtggtgactttcagcgtgcgggtcgggaagccgcacagggccacgcagcaccaccttctccgtttgccaaccttgcaggaacagcttccggtaatcaaatttttccaacggcctttt

SEQ ID NO: 807 - DNA, 470 bp, Artificial Sequence
  Description of Artificial sequences:primer
  misc_feature (1)..(470): 5' terminal sequence from clone image:341984.
  misc_feature (218)..(218): n is a, c, g, or t
  misc_feature (232)..(232): n is a, c, g, or t
  misc_feature (235)..(235): n is a, c, g, or t
  misc_feature (408)..(408): n is a, c, g, or t
gattcggcaccagggtgatcacgaacaaatggcgtacgttaagaaggatcaggctcccgcgcaggagacgcagcgtgtgcttgtgaagatgacgagccgcaacgcaaaggcggtggagaatgtgatgacggagctgctcctgcacgctcgcaacgagaaggtggtgctgcgtggccctgtgcgcctcccagacccagcacgctgaaagtcaccacccngcaaaacgccgtgngtnaacggcaccaacacgtgggacacttacgagctgaagatctacaagcgtcttgtagagctccgcgccgccgacggagcttgtgaagaagattacatccttcccctattgacgctggcgtggacgtccgccatcacaatcccacacgaccagttagcctgccccgcatgtggganaaggtgggaggccgcgccgcaactgtctcatgccatcttggggggaagagtttattttcccc

SEQ ID NO: 808 - DNA, 408 bp, Artificial Sequence
  Description of Artificial sequences:primer
  misc_feature (1)..(408): 3' terminal sequence from clone image:342054. chromosome x open reading frame 6(CXORF6) gene.
  misc_feature (343)..(343): n is a, c, g, or t
  misc_feature (355)..(355): n is a, c, g, or t
cacttttctcctcggctgtttattacagaacgaagaaaaaacacactcggcttgaaacagacgccagatttcaaatgtagaggtgaaatacgaggtggcaattaaaatgtgattacagaaagtctggacactgagaaaagtttacaggacagtgggtgtgggttttctataacagacacttaaatatacatgacgataattgcagatagaaaccatcaaagacaaaccccaaatcaactaataatgtttacagatgttcccccccaaaccacagagccttacatcaaaacaaatactgaaaggctttaaaccaggaacagctcgccttaaccccacgagggtngcacacaagctngggctttttctctcggtctgaatggtaaagggaggaggatactctagctcctc

SEQ ID NO: 809 - DNA, 480 bp, Artificial Sequence
  Description of Artificial sequences:primer
  misc_feature (1)..(480): 5' terminal sequence from clone image:342054. chromosome x open reading frame 6(CXORF6) gene.
  misc_feature (478)..(478): n is a, c, g, or t
cccatggtgacatcactctaggaagtggtgtcgatccatacccgcagttgtctcccgttacaatttgagtggtgttgtcagcccatgcttatccctctctctacctgtgacaaaatggaaagctggtgatttttcaagctacgtgtacatatttgaaaattttgtaaatggttttcctaaacattaatgacagaagtatttatacttcattttgtgactttgtaaataaagcgacggcttttgtttcagtagagttgtgtttactatgcattgttttgtgtttattatacaatgttacaaatatgcagaccgtgttgtttgctccagtgataccttgttaagctaggtggctgagtccgcttatgggttttaatgcaatgaagcaatgtggatatgaccaagagttgttgtgcaagttgacaaatgccaaatagaaaaccacttgggccatttatttccatggttcactaaaaatccnat

SEQ ID NO: 810 - DNA, 4599 bp, Artificial Sequence
  Description of Artificial sequences:primer
  misc_feature (1)..(4599): chromosome x open reading frame 6(CXORF6) gene.
ccctgtgtctaggtcgtttgggaaacgccttggagagtcaagaataaatttgcaggtcaaacaatggatgactggaaaagtcggcttgtaatcaagagcatgcttccccatttcgccatggtgggaaatcgtcaggagcccagaaagctccaggaatcgggaaagaagccctcgtggatggaggaagaagatttatcttttctctacaagagcagcccaggaagaaagcatcaggggaactgttaacaggagacaagaagaagaccacttccagtttccagacatggctgatgggggctaccctaataaaattaagaggccttgccttgaagatgtcacccttgcaatgggcccaggtgctcatcctagtactgcttgtgcagaactgcaggtccctccattgacaataaatcctagccctgcggctatgggagtggctggccagtcattactgctggagaataaccctatgaatggcaacatcatgggctcaccatttgtagtaccacagactacagaagtgggactgaaagggcccactgttccttactatgagaaaatcaacagcgtgccggctgtagaccaggagcttcaagagctgctagaggagctcaccaaaattcaagacccttctccaaatgagctagatcttgagaagatactggggacgaagccagaagagccactggttttagatcatccccaggcaaccctaagcacaactcccaagccttcggttcagatgtcacacttggagagcctggcttccagcaaggagtttgcttctagttgcagccaagttactggcatgtcacttcagatcccatcctcctccacagggatcagctattcgattccttccaccagtaagcagatagtgtcaccgagttcttcaatggcacagtccaagagccaggtccaggccatgctccctgtcgctctgccccccttaccagtgcctcagtggcatcacgcccaccagctgaaggcgttggcagccagcaagcaggggtctgctacaaagcagcaagggcccacccccagttggtctggtctgcctcctccaggactctctccaccttcccgcccagtgccatcactacagccaccaccgctgccactgccaccaccaccacccccattcagcccccagagcctcatggtgtcctgcatgtcgtccaataccttgtcgggtagcactctccgaggctctcccaatgccttactgtcaagcatgacgtccagcagcaatgctgccctggggcccgccatgccctatgctcctgagaagctccccagccctgctctcactcaacagccgcagttcggccctcagagctccattcttgccaacctcatgtcctctaccatcaaaacccctcaaggacacctgatgtctgctctgcctgccagcaaccctgggccgtccccaccctatcgcccagagaagctctctagcccaggcttgccacagcagtccttcaccccacagtgttccctgatccgaagcctcactcccaccagtaatcttctaagccagcaacagcagcagcagcagcagcagcagcaagcaaatgtgatctttaagcccataagcagcaactcatccaaaaccctgagcatgatcatgcagcaggggatggcaagctccagcccaggagccacggagccatttacttttggcaacaccaagcccttgtcccattttgtttctgagccgggtccccagaagatgccctccatgcctaccacctctaggcagccttccctgctccactacctgcagcagccgacaccaacgcaggcctcctcagccactgcctcctccacggccactgccaccttgcagctgcagcagcagcagcagcaacagcagcagcagcctgaccattcttcattccttctgcagcagatgatgcagcaaccccagcgttttcagcgatcagtggcctcagattccatgcctgctctgcccagacaggtctgttgccatctgtttgcatggacttctgcagctagctcggtgaagccccagcatcaacacgggaactctttcactagcaggcaagatcctcagcctggagacgtgtcaccgtctaacattactcatgtagacaaagcctgcaagcttggggaagccaggcacccccaggtcagcctcgggcgacagcccccgtcctgccaggccctggggagtgagtccttcctgcccggcagctcctttgctcatgagctggcccgagtcacctcctcgtacagcacctcagaggcagcgccctggggcagctgggatccgaaggcctggaggcaggtgcccgctccactactgcctagctgcgacgccacagcaagaggaacagagatcaggtcttatggcaatgacccctgaacggcagaatgcatatatctcccaacagatgagtccatttgaagccgtccaagaacaagtcacctccaagtgtagccggatcaaggcaagccccccatctagcaagcacttgatgccacccagaactgggcttcttcagaacaatctgagtccaggaatgatcccactcaccaggcaccagagctgcgagggcatgggagtgatctcaccaactctggggaagcggcaaggaattttcacctccagcccccagtgtcccatcctctcacactcaggccagactcccctgggcagacttgactctgtctgccagcatatgcagagccccaaggccaccccaccagaagtgcccctgcctgggttctgtcccagctccctgggcacccagtccttgagtccccaccagctcagacggcctagtgtgccaagaatgcccactgcgttcaacaatgctgcatgggtcacagcggcagcagctgtgaccacagcagtttcggggaaaacacccctcagccaagtggataatagcgttcagcagcactcaccttctggccaggcctgccttcagaggccatctgattgggaggcacaagtgcccgctgcgatgggaacacaagtgcccctggccaacaaccccagcttcagcctgctgggcagccagagcctcaggcagagcccggtacagggcccggtgcctgtagcaaacaccaccaagttcctccagcagggtatggccagctttagtcccctgagccccatacagggcatcgagccaccaagctatgtggctgctgctgccaccgctgctgctgcttctgccgttgctgccagccagttcccaggtccgttcgacagaacggatattccccctgagctgccacctgccgactttttgcgccagccccaacccccactaaatgatctgatttcgtcacctgactgcaatgaggtagatttcattgaagctctcttgaaaggctcctgtgtgagcccagatgaagactgggtgtgcaacttgaggctgatcgacgacattttggaacagcatgctgctgctcaaaatgccacagcccagaattctgggcaagtcacccaggatgctggggcactttaaatctgagcaggatgcccatagaaacccccatggtgacatcactctaggaagtggtgtcgatccatacccgcagttgtctcccgttacaatttgagtggtgttgtcagcccatgcttatccctctctctacctgtgacaaaatggaaagctggtgatttttcaagctacgtgtacatatttgaaaattttgtaaatggttttcctaaacattaatgacagaagtatttatacttcattttgtgactttgtaaataaagcgacggcttttgtttcagtagagttgtgtttactatgcattgttttgtgtttattatacaatgttacaaatatgcagaccgtgttgtttgctccagtgataccttgttaagctaggtggctgagtcgcttatggttttaatgcaatgagcaatgtggatatgaccaagagttgttgtgcaagttgacaaatgccaaatagaaaaccacttggccatttatttctatgttcactaaaaatcctattgccttgtgtgattcttaatctcttttgcgaacctttcagtctccgctagctctttcctaatgagctttacagcagaagctgttttatcgttaagtgccccacagagacactttaccaggaggctgggagagttctccagatttgggagaggcgcagagacagtgtgtgagccgagccctgtctcagcaatccacctggaggagctagagtatcctcctccctttaccattcagaccgagagaaaaagcccagcttgtgtgcaccctcgtggggttaaggcgagctgttcctggtttaaagcctttcagtatttgttttgatgtaaggctctgtggtttgggggggaacatctgtaaacattattagttgatttggggtttgtctttgatggtttctatctgcaattatcgtcatgtatatttaagtgtctgttatagaaaacccacacccactgtcctgtaaacttttctcagtgtccagactttctgtaatcacattttaattgccacctcgtatttcacctctacatttgaaatctggcgtctgtttcaagccagtgtgttttttcttcgttctgtaataaacagccaggag

SEQ ID NO: 811 - DNA, 426 bp, Artificial Sequence
  Description of Artificial sequences:primer
  misc_feature (1)..(426): 3' terminal sequence from clone image:342416. beta-2-microglobulin(B2M) gene.
  misc_feature (256)..(256): n is a, c, g, or t
  misc_feature (316)..(316): n is a, c, g, or t
  misc_feature (340)..(340): n is a, c, g, or t
  misc_feature (363)..(363): n is a, c, g, or t
  misc_feature (383)..(383): n is a, c, g, or t
  misc_feature (392)..(392): n is a, c, g, or t
  misc_feature (394)..(394): n is a, c, g, or t
  misc_feature (397)..(397): n is a, c, g, or t
  misc_feature (400)..(400): n is a, c, g, or t
  misc_feature (410)..(410): n is a, c, g, or t
  misc_feature (424)..(424): n is a, c, g, or t
caagttttatgatttatttaacttgtggaacaaaaataaaccagattaaccacaaccatgccttactttatcaaatgtataagaagtaaatatgaatcttatatgacaaaatgtttcattcattataacaaatttccaataatcctgtcaattatatttctaaattttcccccaaattctaagcagagtatgtaaattggaagttaacttatgcacgcttaactatcttaacaagctttgagtgcaagagattgangagttcaaatctgaccaagatgttgatgttggataagagaattctctgctccccacctcnaaagttgcaagccctcctagagcnacctggtggagcaacctggctcnggatacatccaaacatgggngacagcccncnaangtngaattttaangaagatcatgtccntg

SEQ ID NO: 812 - DNA, 440 bp, Artificial Sequence
  Description of Artificial sequences:primer
  misc_feature (1)..(440): 5' terminal sequence from clone image:342416. beta-2-microglobulin(B2M) gene.
  misc_feature (43)..(43): n is a, c, g, or t
  misc_feature (75)..(75): n is a, c, g, or t
  misc_feature (344)..(344): n is a, c, g, or t
gacagcattcgggccgagatgtctcgctccgtggccttagctntgtcgcgctactctctctttctggcctggagntatccagcgtactccaaagattcaggtttactcacgtcatccagcagagaatggaaagtcaaatttcctgaattgctatgtgtctgggtttcatccatccgacattgaagttgacttactgaagaatggagagagaattgaaaaagtggagcattcagacttgtctttcagcaaggactggtctttctatctcttgtactacactgaattcacccccactgaaaaagatgagtatgcctgcccgtgtgaaccatgtgactttgtcacangcccaagatatgttaagtgggatcgagacatgtaagcagcatcatggaggtttgaagatgccgcatttggattggaagaattccaaaattccgctt

SEQ ID NO: 813 - DNA, 925 bp, Artificial Sequence
  Description of Artificial sequences:primer
  misc_feature (1)..(925): beta-2-microglobulin(B2M) gene.
ggcacgagccgagatgtctcgctccgtggccttagctgtgctcgcgctactctctctttctggcctggaggctatccagcgtactccaaagattcaggtttactcacgtcatccagcagagaatggaaagtcaaatttcctgaattgctatgtgtctgggtttcatccatccgacattgaagttgacttactgaagaatggagagagaattgaaaaagtggagcattcagacttgtctttcagcaaggactggtctttctatctcttgtactacactgaattcacccccactgaaaaagatgagtatgcctgccgtgtgaaccatgtgactttgtcacagcccaagatagttaagtgggatcgagacatgtaagcagcatcatggaggtttgaagatgccgcatttggattggatgaattccaaattctgcttgcttgctttttaatattgatatgcttatacacttacactttatgcacaaaatgtagggttataataatgttaacatggacatgatcttctttataattctactttgagtgctgtctccatgtttgatgtatctgagcaggttgctccacaggtagctctaggagggctggcaacttagaggtggggagcagagaattctcttatccaacatcaacatcttggtcagatttgaactcttcaatctcttgcactcaaagcttgttaagatagttaagcgtgcataagttaacttccaatttacatactctgcttagaatttgggggaaaatttagaaatataattgacaggattattggaaatttgttataatgaatgaaacattttgtcatataagattcatatttacttcttatacatttgataaagtaaggcatggttgtggttaatctggtttatttttgttccacaagttaaataaatcataaaacttg

SEQ ID NO: 814 - DNA, 214 bp, Artificial Sequence
  Description of Artificial sequences:primer
  misc_feature (1)..(214): 3' terminal sequence from clone image:34260. chloride intracellular channel 5(CLIC5) gene.
  misc_feature (70)..(70): n is a, c, g, or t
  misc_feature (120)..(120): n is a, c, g, or t
  misc_feature (123)..(124): n is a, c, g, or t
  misc_feature (189)..(189): n is a, c, g, or t
  misc_feature (211)..(211): n is a, c, g, or t
ttttttttttttcacctggacagttgagtcagattgtaggaaaattaacccagatgggtctacatttttnttcaagttcaaaccacatggtttcctagtcagaaagtctcatggactttnttnntaagctgttctatgatcagaccacctcctaaatgtggcttttacccattacaggctacagttgantcaggcaggagcagctgctggnaga

SEQ ID NO: 815 - DNA, 470 bp, Artificial Sequence
  Description of Artificial sequences:primer
  misc_feature (1)..(470): 5' terminal sequence from clone image:34260. chloride intracellular channel 5(CLIC5) gene.
  misc_feature (17)..(17): n is a, c, g, or t
  misc_feature (303)..(303): n is a, c, g, or t
  misc_feature (412)..(412): n is a, c, g, or t
  misc_feature (454)..(454): n is a, c, g, or t
atgacaggcctgtggantgacctcaagaacgcctatgcccgtgatgagttcaccaacacctgtgcagctgacagtgagatcgagttggcctacgctgatgtcgccaaacgcctcagccgatcctgagcacagccattttgccccatccccgctgcagaaggactcaaccactcccctaagactccagcttcatagactcctctgtatcactgccttgaggcgcactttttataatcaagcctcatcttgctggtatcatgggaactccagcctgctatctttcatgaaggtcagcaccatccngggcctcctcacatagggaatctaggcaggaaatgataggacacagtccacctttcggccggccagcctgatctggggctcagcatgttttgggggtcagtcagtgttnggagagcccacatatgggggtttgccattaggttttttttgnccattatcaaaaataa

SEQ ID NO: 816 - DNA, 2380 bp, Artificial Sequence
  Description of Artificial sequences:primer
  misc_feature (1)..(2380): chloride intracellular channel 5(CLIC5) gene.
cggatcctgtgacacctccgggcagcccggcacttgttgctcccacgacctgttgtcattcccttaacccggctttccccgcctcctcccggcttcgctccttttcatgtgagcatctgggacactgatctctcagaccccgctgctcgggctggagaatagatggttttgtgaaaaattaaacaccgccctgaagaggagccccgctgggcagcggcaggagcgcagagtgctggcccaggtgctgcagaggtggcgcctccccggcccgggacggtagccccgggcgccaacggcatgacagactcggcgacagctaacggggacgacagtgaccccgagatcgagctctttgtgaaggctggaatcgatggagaaagcatcggcaactgtcctttctctcagcgcctcttcatgatcctctggctgaaaggagtcgtgttcaatgtcaccactgtggatctgaaaagaaagccagctgacctgcacaacctagcccccggcacgcacccgcccttcctgaccttcaacggggacgtgaagacagacgtcaataagatcgaggagttcctggaggagaccttgacccctgaaaagtaccccaaactggctgcaaaacaccgggaatccaacacagcgggcatcgacatcttttccaagttttctgcctacatcaaaaataccaagcagcagaacaatgctgctcttgaaagaggcctaaccaaggctctaaagaaattggatgactacctgaacacccctctaccagaggagattgacgccaacacttgtggggaagacaaggggtcccggcgcaagttcctggatggggatgagctgaccctggctgactgcaatctgttgcccaagctccatgtggtcaagattgtggccaagaaataccgcaactatgatatcccggctgagatgacaggcctgtggcggtacctcaagaacgcctatgcccgtgatgagttcaccaacacctgtgcagctgacagtgagatcgagttggcctacgctgatgtcgccaaacgcctcagccgatcctgagcacagccattttgccccatccccgctgcagaaggactcaaccactcccctaagactccagcttcatagactcctctgtatcactgccttgaggcgcactttttataatcaagcctcatcttgctggtatcatgggaactccagcctgctatctttcatgaaggtcagcaccatccctggcctcctcacataggaatctagcagaaatgatagacacagtccacctttcggccggccagcctgatctgggctcagcatgtttggggtcagtcagtgttggagagcccacatatgggattgccactagcttcttctgccaatatcaaaataccttctcagatgctttagaaacatgcaacaccaactccttttctaccctcctctctgtccatacctacaaggccaaggacaaacgccatcttcatccttcttagaaagagatctattaccccattaggggagacagagagagtgaatggaggagtaccgagctggctatggacttgggtgtctggcaaacacagcttcagtctcactacttctgacactctggttattgggcactaagggccagactggaaagtcacttgagacacattctcagtttgttgcagtgccaggaatgctgcgctgctgctgctgcgcacctggcccatgctgtccctggcttccatgccgtccaggccctgccagaaaaggaaattggcatgcaattctaaactgcagtgactgggatgggaggggaggggagcagtgttgatgccaaaatacccacggggtctaccagccatggggtttgcttgcttaggagtagttgtttcagaggtgattacaggcctgggtttgactgtgcttaccaatgagtggtttttgagctatgagaaagtggatgggagtgggaggaggagagatgggtgaagacaaaagagttctttatgagcctcgatgttccctggtaaacttttaaaaaggccttctctcatgatctaagtcttggactggtggcatcatgtaactgctaaccttacagtaaaaacccaagaatgggtcaaaaatgtcttcccagtttctccaagctgcttctggaatgcaggtctgtcggctgggtgctctccagcagctgctcctgcctgattcaactgtagcctgtaatgggtaaaagccacatttaggaggtggtctgatcatagaacaccttaggaagaaagtccatgagactttctgactaggaaaccatgtggtttgaacttgaagaaaaatgtagacccatctgggttaattttcctacaatctgactcaactgccaggtgaaaaaaaaaaaaaaaaa

SEQ ID NO: 817 - DNA, 363 bp, Artificial Sequence
  Description of Artificial sequences:primer
  misc_feature (1)..(363): 3' terminal sequence from clone image:343578. necdin homolog (mouse)(NDN) gene.
  misc_feature (349)..(349): n is a, c, g, or t
gattgtatcacaagaatctttaatgtttactttaaagttgactcacggtggggttgtatatgtgtttagtaaagtgtgccaagtgctcacactgagaccagtccagttcaaattagtgtactccacgagggtgttttctgtgcccagcaaggtcatggaagggccttgacttttcttggttaggccggctttgctggtggacttcttccaaactctgcaggagcagtctaccccaacacacatcatcagtcccatataaaagaataagatggaaactttctcaatgtatttcatcagtttagcacatctctggtacaaaaatccaagaaaggtagcacaaaagcgaaanacacaaccaagctt

SEQ ID NO: 818 - DNA, 450 bp, Artificial Sequence
  Description of Artificial sequences:primer
  misc_feature (1)..(450): 5' terminal sequence from clone image:343578. necdin homolog (mouse)(NDN) gene.
  misc_feature (331)..(331): n is a, c, g, or t
cgtcgagttattcacgtgtaacttttaagttttcagtacagtgcttttatacctttaatgcaatgttgtattcatttgggtactattgtgtagtatttaggatgtatgcatgtttgtttatatgtaagcttggttggtgctttcgcttttgtgctacctttcttggatttttgtaccagagatgtgctaaactgatgaaatacattgagaaagtttccatcttattcttttatatgggactgatgatgtgtgttggggtagactgctcctgcagacgtttggaagaagtcaccaagcaaagccggcctaaccaagaaaaagtcaaggcccntcatgaccttgctgggcacagaaaacaccctccgtggagtacactaatttgaactggactggtctcagtgtgagcacttggcacactttactaaacacatatacaaccccaccgtgagt

SEQ ID NO: 819 - DNA, 1897 bp, Artificial Sequence
  Description of Artificial sequences:primer
  misc_feature (1)..(1897): necdin homolog (mouse)(NDN) gene.
acttcctctccaggaatccgcggagggagcgcaggctcgaagagctcctggacgcagaggccctgcccttgccagacggcgcagacatgtcagaacaaagtaaggatctgagcgaccctaactttgcagccgaggcccccaactccgaggtgcacagcagccctggggtttcggagggggttcctccgtccgcgaccctggcagagccgcagagccctcctctaggcccgacggccgctccgcaggccgcgccgcctccccaggccccgaacgacgagggcgacccgaaggccctgcagcaggctgcggaggagggccgcgcccaccaggccccgagcgcggcccagccgggcccggcaccgccagccccggcgcagctggtgcagaaggcgcacgagctcatgtggtacgtgctggtcaaggaccagaagaagatgatcatctggtttccagacatggtgaaagatgtcatcggcagctacaagaagtggtgcaggagcatcctccggcgcaccagcctcatcctcgcccgggtgttcgggctgcacctgaggctaaccagcctgcacaccatggagtttgcgctggtcaaagcgctggagcccgaggagctggacagggtggcgctgagcaaccgcatgcccatgacaggcctcctgctcatgatcctgagcctcatctacgtgaagggccgcggcgccagagagagcgccgtctggaacgtgctgcgcatcctggggctgcggccctggaagaagcactccaccttcggggacgtgcggaagctcatcactgaggagttcgtccaaatgaattacctgaagtaccagcgcgtcccatacgtggagccgcccgaatacgagttcttttggggctcccgggccagccgcgaaatcaccaagatgcaaatcatggagttcctggccagggtctttaagaaagacccccaggcctggccctcccgatacagagaagctctggaggaggccagagctctgcgggaggctaatcccactgcccactaccctcgcagcagtgtctctgaggactagcaaagtctggaggcagatgaatggtttctgaccctcaccagggctgtggaagggtgggggtgggtcattatagtattcaggatttacagtgcagtattcacgtgtaacttttaagttttcagtacagtgcttttatacctttaatgcaatgttgtattcatttgggtactattgtgtagtatttaggatgtatgcatgtttgtttatatgtaagcttggttggtgctttcgcttttgtgctacctttcttggatttttgtaccagagatgtgctaaactgatgaaatacattgagaaagtttccatcttattcttttatatgggactgatgatgtgtgttggggtagactgctcctgcagagtttggaagaagtcaccagcaaagccggcctaaccaagaaaagtcaaggcccttcatgaccttgctgggcacagaaaacaccctcgtggagtacactaatttgaactggactggtctcagtgtgagcacttggcacactttactaaacacatatacaaccccaccgtgagtcaactttaaagtaaacattaaagattcttgtgatacaatcatttttggaaaagtgtactttatcattttaacaaagcagtatggttgggaatgagacaattctctattttacagtgtatacagatacaactatttcccctaatagggtgggaaaaatcgctactcatgattactcctaaatttgtgaagtttatagttctattgtctttaaatgtaactcatgtttatttcaaaaacattcacaaatatagaaaagtatacaaaacaaaacagtaagattgtctgtaatcacatcatatgggaataaaaaaca

SEQ ID NO: 820 - DNA, 425 bp, Artificial Sequence
  Description of Artificial sequences:primer
  misc_feature (1)..(425): 3' terminal sequence from clone image:344037. oxysterol binding protein-like 1a(OSBPL1A) gene.
tgcttttatcttgaatgtagccttcaactttgtgtaattccttaccaaaaaggccacatggcttaaaattcaacacacatttgtccccagtcttgtggtttataatttccacattgccatactgttcgatccacagtttacccacaatgatattatgcacacagcaggtgggatttgtccatgtatatgcctcattgtgttcaaggagctccaaggtgatggttcctttgggttctgcttctacactcttcccccagaatttcagtttgggatagatagagccatgaaagatgaagtcattgtttaatccttcagcatgaaatgcactgattggtgggtgatggctggacctgttcggagatgagtctaaatccaaggtcatctcgcactaattcataagtctctcccagcagtggggttgaaag

SEQ ID NO: 821 - DNA, 426 bp, Artificial Sequence
  Description of Artificial sequences:primer
  misc_feature (1)..(426): 5' terminal sequence from clone image:344037. oxysterol binding protein-like 1a(OSBPL1A) gene.
  misc_feature (387)..(387): n is a, c, g, or t
ctcatccacaaggccagttcactctctgatcctgtggaaaggatgcagtgtgtagctgcgtttgctgtatctgctgttgcttctcagtgggaacggactggaaaacctttcaacccactgctgggagagacttatgaattagtgcgagatgaccttggatttagactcatctccgaacaggtcagccatcacccaccaatcagtgcatttcatgctgaaggattaaacaatgacttcatctttcatggctctatctatcccaaactgaaattctgggggaagagtgtagaagcagaacccaaaggaaccatcaccttggagctccttgaacacaatgaggcatatacatggacaaatcccacctgctgtgtgcataatatcattgtnggtaaactgtggatcgaacagtatggcaatgtggaaatt

SEQ ID NO: 822 - DNA, 4165 bp, Artificial Sequence
  Description of Artificial sequences:primer
  misc_feature (1)..(4165): oxysterol binding protein-like 1a(OSBPL1A) gene.
ccgtggtcccggcgccgggtcccggagacagacgttacgcgggctcgagcgtcctcggggagtgccagccagagttggtgacgaccacttcctcgacgtggggcgggcggacgggaagcctggggtcgtggccaccgcctcgggagctctgggagcccgggtgaccgcgtagaaatgaacacagaagcggagcaacagcttctccatcacgccagaaatggcaatgctgaagaagtaagacaactattagagaccatggcgaggaatgaagtgattgctgacattaattgcaaaggaagaagtaagtctaacttgggctggacacctctacatctggcatgctattttggacacagacaagtggtccaggatctgttgaaggctggtgcagaagtgaatgtgttgaatgacatgggagacacgccgcttcatcgagctgcctttacaggacgaaaggagttggtaatgcttctcttagaatataatgctgatactactattgttaatgggagtggacagacagcaaaagaagttactcatgctgaagaaatcagaagcatgcttgaagctgtagaaaggactcaacaaagaaagcttgaagaattacttttagcagcagcaagagaaggcaaaacaacagaactcacagctctgctcaacaggcccaatcctcctgatgttaactgttcggatcagttaggaaatacacccttgcattgtgcagcttaccgggcccataaacaatgtgccttaaagcttctaagaagtggagcagaccctaatctgaagaacaaaaatgatcagaaacctcttgaccttgcccagggtgctgaaatgaaacacattcttgttggtaataaggtcatctacaaagcattgaaacgatatgagggccctctctggaagagttcaagattttttggctggagattattctgggtagtgttagagcatggagtcctttcatggtataggaaacagcctgatgcagttcataatatttatcgccagggatgcaaacacctgactcaagcagtatgcacggtaaaatccactgatagctgcctcttctttattaaatgctttgatgacaccattcatggcttccgggttcctaagaatagccttcagcagtcaagagaggactggctggaagcaatagaagaacattctgcttacagcactcactactgttcccaggaccagctgactgatgaggaggaggaagatacggtttctgctgcagacctgaagaaatcattagagaaagcacagtcatgccaacagcgactagatagggaaatttccaactttctcaaaatgattaaggagtgtgacatggctaaagaaatgcttccatcatttcttcagaaagttgaagttgtctcagaagcttctagagaaacttgtgtagctttgactgattgccttaatctcttcaccaaacaagaaggggtgaggaattttaaattggaacaagagcaagaaaaaaacaaaatcttgtcagaagcactggagacgctggccactgaacatcatgaattagagcagtctctggtgaaaggctctccacccgccagcatccttagcgaggacgagttctatgatgcgctgtcagattccgagtccgaaaggtccctgagtagattggaagcagtgacagcacgctcctttgaagaggaaggagagcatttgggcagtagaaaacacagaatgtccgaagaaaaagactgtggtggcggagatgctctctccaatggcatcaagaaacacagaacaagtttgccttctcctatgttttccagaaatgacttcagtatctggagcatcctcagaaaatgtattggaatggaactatccaagatcacgatgccagttatatttaatgagcctctgagcttcctacagcgcctaactgaatacatggagcatacttacctcatccacaaggccagttcactctctgatcctgtggaaaggatgcagtgtgtagctgcgtttgctgtatctgctgttgcttctcagtgggaacggactggaaaacctttcaacccactgctgggagagacttatgaattagtgcgagatgaccttggatttagactcatctccgaacaggtcagccatcacccaccaatcagtgcatttcatgctgaaggattaaacaatgacttcatctttcatggctctatctatcccaaactgaaattctgggggaagagtgtagaagcagaacccaaaggaaccatcaccttggagctccttgaacacaatgaggcatatacatggacaaatcccacctgctgtgtgcataatatcattgtgggtaaactgtggatcgaacagtatggcaatgtggaaattataaaccacaagactggggacaaatgtgtgttgaattttaagccatgtggcctttttggtaaggaattacacaaagttgaaggctacattcaagataaaagcaaaaagaagctctgtgccctctatgggaagtggactgaatgtttatacagtgttgaccctgccacgtttgacgcttacaaaaaaaatgataagaaaaatacagaagagaagaagaacagcaaacagatgagcacctctgaggagttggatgaaatgccagtgccggattctgaaagtgtattcattatccctggaagcgttcttctatggcgaatagccccacggcctccaaattctgcccagatgtataattttactagttttgcaatggttttgaatgaagtagacaaagacatggagagtgtgattcccaagacagactgcaggttacggcctgacatcagagccatggaaaatggagagatagatcaagctagtgaagaaaaaaaacgacttgaggaaaaacaaagagcagcccgcaaaaacaggtccaagtcagaagaggactggaagacgaggtggttccatcaaggtcctaatccctacaatggagcacaggactggatttactctggcagctactgggacagaaattacttcaatttgcctgacatttattaaaatgcatacaagtcagggtgtttggctaatctacaaataagtcttaaacctatgtttttaaatttttttcccttggtttctacttatcttttaaaaaaaaaatgaaaaaacactcatgagataactgcatttcacccaacaaaagcagggtataaggcgatattggtgatgaaagtcttaggaaaaatgcataattttgctataaaatgtacttatttggaatactattttatatagaggtaagagaacactgctggggaatatgctttttatggttgctgttgccatatttactgaaggtttatacctaaatgtaactttagctttatggaactatatagtaatcccaaatcaagttattttgaatatttttatgctgtcatgcttgaatgttttagatgtaacctttgacatatttagaactctcctcctatacaatgtttattctcagatatagaggttatgtcattttataaagacttcattgataagatggcttttattcatactaatcctcccaatgttaccccttccatcttccaagaagaaaaaaaatgcctgaatattcagaatagatatttctgatttgaaaattctaaagaattaaactggaaaagtatttcatttacttagtgctctgaatttacttttacagttttctgcagtcagtatcattaaaatggttaagtttacatttgaactgaaaatatgtataaaatctagcaattcacaaaaatgccctagaaatatagattttaatcaccattacataatgacaaaccttgttaaatgcttccacttccagtggcaaatgccactagggaaagtaagttgcactcatgtaagtatcaaactatataaaaggaggccttgtgcatttcaagtttgcaaagtacctgtgtacttaaaatatgtgtggagacctactgtacagtagttttgcccctttaattggggcacattcatcttaaatcttatagtatttatccacccaaaccccagactgagatactgctcccaggggcctaggtagctgccagtccgtgattttaattgctgtcttgaagttaacaagtgttataatgaaataatctacctgatgctaaataaaggctttagaatgttccccaaaaaaaaa

SEQ ID NO: 823 - DNA, 468 bp, Artificial Sequence
  Description of Artificial sequences:primer
  misc_feature (1)..(468): 3' terminal sequence from clone image:344326. collagen, type vi, alpha 1(COL6A1) gene.
tttttttttttttgaggagtgaaaacctttatttggaaaagtcagcaacatggatatggttcagaaaaaaacacagaaggagcaaaactaacatgaacatagaaagggggcctttgataaaacgtcgaacacatcactattctgaggaaggagaggtttgcgttgtttctagtaagacacagccctctgtggcaccaaggggctctcatgtccagtccaggccccagtctctgcgggagggaggagcagacggggttagcaccgttaatctcgagggtcttgagtgcagccagcgcccctgcgagtactctctgaggtcggggtcagtgctggtcagcagcggcctccagggctgtagggccaaggtccaggccggtcaccagcaggaccctcaggagacggggccgagtcgccgagatttatgtctgcaacggcctcctgaccttggtttcccaaaacgcctcgtgc

SEQ ID NO: 824 - DNA, 458 bp, Artificial Sequence
  Description of Artificial sequences:primer
  misc_feature (1)..(458): 5' terminal sequence from clone image:344326. collagen, type vi, alpha 1(COL6A1) gene.
cgttttgggaaaccaaggtcaggaggccgttgcagacataaatctcggcgactcggccccgtctcctgagggtcctgctggtgaccggcctggaccttggccctacagccctggaggccgctgctgaccagcactgaccccgacctcagagagtactcgcaggggcgctggctgcactcaagaccctcgagattaacggtgctaaccccgtctgctcctccctcccgcagagactggggcctggactggacatgagagccccttggtgccacagagggctgtgtcttactagaaacaacgcaaacctctccttcctcagaatagtgatgtgttcgacgttttatcaaaggccccctttctatgttcatgttagttttgctccttctgtgtttttttctgaaccatatccatgttgctgacttttccaaataaaggttttcactcctcaaaaaaaaaaa

SEQ ID NO: 825 - DNA, 4164 bp, Artificial Sequence
  Description of Artificial sequences:primer
  misc_feature (1)..(4164): collagen, type vi, alpha 1(COL6A1) gene.
cactctggctgggagcagaaggcagcctcggtctctgggcggcggcggcggccctctctgccctggccgcgctgtgtggtgaccgcaggcccgagacatgagggcggcccgtgctctgctgcccctgctgctgcaggcctgctggacagccgcgcaggatgagccggagaccccgagggccgtggccttccaggactgccccgtggacctgttctttgtgctggacacctctgagagcgtggccctgaggctgaagccctacggggccctcgtggacaaagtcaagtccttcaccaagcgcttcatcgacaacctgagggacaggtactaccgctgtgaccgaaacctggtgtggaacgcaggcgcgctgcactacagtgacgaggtggagatcatccaaggcctcacgcgcatgcctggcggccgcgacgcactcaaaagcagcgtggacgcggtcaagtactttgggaagggcacctacaccgactgcgctatcaagaaggggctggagcagctcctcgtggggggctcccacctgaaggagaataagtacctgattgtggtgaccgacgggcaccccctggagggctacaaggaaccctgtggggggctggaggatgctgtgaacgaggccaagcacctgggcgtcaaagtcttctcggtggccatcacacccgaccacctggagccgcgtctgagcatcatcgccacggaccacacgtaccggcgcaacttcacggcggctgactggggccagagccgcgacgcagaggaggccatcagccagaccatcgacaccatcgtggacatgatcaaaaataacgttgagcaagtgtgctgctccttcgaatgccagcctgcaagaggacctccgggcctccggggcgaccccggctttgagggagaacgaggcaagccggggctcccaggagagaagggagaagccggagatcctggaagacccggggacctcggacctgttgggtaccagggaatgaagggagaaaaagggagccgtggggagaagggctccaggggaccaaagggctacaagggagagaagggcaagcgtggcatcgacggggtggacggcgtgaagggggagatggggtacccaggcctgccaggctgcaagggctcgccgggttttgacggcattcaaggaccccctggccccaagggagaccccggcgcctttggactgaaaggagaaaagggcgagcctggagctgacggggaggccgggagaccaggagctcggggaccatctggagacgaggggccagccggagagcctgggccccccggagagaaaggagaggcgggcgacgaggggaacccaggacctgacggtgcccccggggagcggggtggccctggagagagaggaccacgggggaccccaggcccgcggggaccaagaggagaccctggtgaagctggcccgcagggtgatcagggaagagaagggcccgttggtgtccctggagacccgggcgaggctggccctatcggacctaaaggctaccgaggcgatgagggtcccccagggtccgagggtgccagaggagccccaggacctgccggaccccctggagacccggggctgatgggagaaaggggagaagacggccccgctggaaatggcaccgagggcttccccggcttccccgggtatcccgggaacaggggcgctcccgggataaacggcacgaagggctaccccggcctcaagggggacgagggagaagccggggaccccggagacgataacaacgacattgcaccccgaggagtcaaaggagcaaaggggtaccggggtcccgagggcccccagggacccccaggacaccaaggaccgcctgggccggacgaatgcgagattttggacatcatcatgaaaatgtgctcttgctgtgaatgcaagtgcggccccatcgacctcctgttcgtgctggacagctcagagagcattggcctgcagaacttcgagattgccaaggacttcgtcgtcaaggtcatcgaccggctgagccgggacgagctggtcaagttcgagccagggcagtcgtacgcgggtgtggtgcagtacagccacagccagatgcaggagcacgtgagcctgcgcagccccagcatccggaacgtgcaggagctcaaggaagccatcaagagcctgcagtggatggcgggcggcaccttcacgggggaggccctgcagtacacgcgggaccagctgctgccgcccagcccgaacaaccgcatcgccctggtcatcactgacgggcgctcagacactcagagggacaccacaccgctcaacgtgctctgcagccccggcatccaggtggtctccgtgggcatcaaagacgtgtttgacttcatcccaggctcagaccagctcaatgtcatttcttgccaaggcctggcaccatcccagggccggcccggcctctcgctggtcaaggagaactatgcagagctgctggaggatgccttcctgaagaatgtcaccgcccagatctgcatagacaagaagtgtccagattacacctgccccatcacgttctcctccccggctgacatcaccatcctgctggacggctccgccagcgtgggcagccacaactttgacaccaccaagcgcttcgccaagcgcctggccgagcgcttcctcacagcgggcaggacggaccccgcccacgacgtgcgggtggcggtggtgcagtacagcggcacgggccagcagcgcccagagcgggcgtcgctgcagttcctgcagaactacacggccctggccagtgccgtcgatgccatggactttatcaacgacgccaccgacgtcaacgatgccctgggctatgtgacccgcttctaccgcgaggcctcgtccggcgctgccaagaagaggctgctgctcttctcagatggcaactcgcagggcgccacgcccgctgccatcgagaaggccgtgcaggaagcccagcgggcaggcatcgagatcttcgtggtggtcgtgggccgccaggtgaatgagccccacatccgcgtcctggtcaccggcaagacggccgagtacgacgtggcctacggcgagagccacctgttccgtgtccccagctaccaggccctgctccgcggtgtcttccaccagacagtctccaggaaggtggcgctgggctagcccaccctgcacgccggcaccaaaccctgtcctcccacccctccccactcatcactaaacagagcccaagcttggaaagccaggacacaacgctgctgcctgctttgtgcagggtcctccggggctcagccctgagttggcatcacctgcgcagggccctctggggctcagctctgagctagtgtcacctgcacagggccctctgaggctcagccctgagctggcgtcacctgtgcagggccctctggggctcagccctgagctggcctcacctgggttccccaccccgggctctcctgccctgccctcctgcccgccctccctcctgcctgcgcagctccttccctaggcacctctgtgctgcatcccaccagcctgagcaagacgcctctcggggcctgtgccgcactagcctccctctcctctgtccccatagctggtttttcccaccaatcctcacctaacagttactttacaattaaactcaaagcaagctcttctcctcagcttggggcagccattggcctctgtctcgttttgggaaaccaaggtcaggaggccgttgcagacataaatctcggcgactcggccccgtctcctgagggtcctgctggtgaccggcctggaccttggccctacagccctggaggccgctgctgaccagcactgaccccgacctcagagagtactcgcaggggcgctggctgcactcaagaccctcgagattaacggtgctaaccccgtctgctcctccctcccgcagagactggggcctggactggacatgagagccccttggtgccacagagggctgtgtcttactagaaacaacgcaaacctctccttcctcagaatagtgatgtgttcgacgttttatcaaaggccccctttctatgttcatgttagttttgctccttctgtgtttttttctgaaccatatccatgttgctgacttttccaaataaaggttttcactcctc

SEQ ID NO: 826 - DNA, 305 bp, Artificial Sequence
  Description of Artificial sequences:primer
  misc_feature (1)..(305): 3' terminal sequence from clone image:344792. mitochondrial ribosomal protein s23(MRPS23) gene.
ttttttataagcagctagggaattctttatttagtaatgtcctaacataaaagttcacataactgcttctgtcaaaccatgatactgagctttgtgacaacccagaaataactaagagaaggcaaacataataccttagagatcaagaaacatttacacagttcaactgtttaaaaatagctcaacattcagccagtgagtagagtgtgaatgccagcatacacagtatacaggtccttcagggaggcaagagacctttcgactggtctgcaggtgcctccaaatgctggtcctgtggaacttct

SEQ ID NO: 827 - DNA, 349 bp, Artificial Sequence
  Description of Artificial sequences:primer
  misc_feature (1)..(349): 5' terminal sequence from clone image:344792. mitochondrial ribosomal protein s23(MRPS23) gene.
  misc_feature (25)..(25): n is a, c, g, or t
  misc_feature (161)..(161): n is a, c, g, or t
  misc_feature (315)..(315): n is a, c, g, or t
  misc_feature (340)..(340): n is a, c, g, or t
ggcagccggctggaaaccgtaggangcatcttctctcggactcgggacctggttcgggccggggtgctgaaggagaagcccctgtggtttgacgtatatgacgcctttcccccgctgagggagcccgtcttccaaaggcctcgagtgcgatatggcaaatncaaagctcccatccaagacatctggtaccacgaggatcggattagagcgaagttttattcagtgtatgggtctggtcaaagagcttttgatctattcaatccaaacttcaagtctacctgtcaacggtttgtggagaagtacactgagctacangaaacttggaagaaacatgatgaangagaaagtt

SEQ ID NO: 828 - DNA, 903 bp, Artificial Sequence
  Description of Artificial sequences:primer
  misc_feature (1)..(903): mitochondrial ribosomal protein s23(MRPS23) gene.
tagtcacgctcggtaccaggcgcagatcatggcaggcagccggctggaaaccgtagggagcatcttctctcggactcgggacctggttcgggccggggtgctgaaggagaagcccctgtggtttgacgtatatgacgcctttcccccgctgagggagcccgtcttccaaaggcctcgagtgcgatatggcaaagccaaagctcccatccaagacatctggtaccacgaggatcggattagagcgaagttttattcagtgtatgggtctggtcaaagagcttttgatctattcaatccaaacttcaagtctacctgtcaacggtttgtggagaagtacactgagctacagaaacttggagaaacagatgaagagaagttatttgtggaaacagggaaggctttattggcagaaggtgtcattttaagacgagtaggcgaagcaaggactcaacacggaggtagtcacgtttcccggaaatccgaacacttgagtgtcagaccacagactgcgttggaagaaaacgagactcagaaagaagttccacaggaccagcatttggaggcacctgcagaccagtcgaaaggtctcttgcctccctgaaggacctgtatactgtgtatgctggcattcacactctactcactggctgaatgttgagctatttttaaacagttgaactgtgtaaatgtttcttgatctctaaggtattatgtttgccttctcttagttatttctgggttgtcacaaagctcagtatcatggtttgacagaagcagttatgtgaacttttatgttaggacattactaaataaagaattccctagctgcttataaagtaaatttactttgaattgtaaataacatgaagaaacctttataaagattgttcaaatgggactcaa

SEQ ID NO: 829 - DNA, 586 bp, Artificial Sequence
  Description of Artificial sequences:primer
  misc_feature (1)..(586): 3' terminal sequence from clone image:345430. phosphoinositide-3-kinase, catalytic, alpha polypeptide(PIK3CA) gene.
  misc_feature (499)..(499): n is a, c, g, or t
  misc_feature (518)..(518): n is a, c, g, or t
  misc_feature (532)..(532): n is a, c, g, or t
  misc_feature (559)..(559): n is a, c, g, or t
  misc_feature (567)..(567): n is a, c, g, or t
  misc_feature (573)..(573): n is a, c, g, or t
catcaaaaggtttgatttattaaaaagaaaaagtctctggtgaaatctcaagagtcccttccaccccaagcatttttcttcattaaacaagcagtcaaaaacccacttcaaactataaattgaacagcaatggaaaaataagaaattttcattcttttccaatcaatgtaatttaacataaactccagtttacttacacctaatgcaataacagcctttgttgtgtccacatttcaaaacatagaacatttgcaagacaaaaaaaaccatcactttttccttctccatcatttctatatattttggggatttttgttttgttttgttttttaaaaaaagatacaaacaatcttcaaagtttacctttttgggacttaaggcataacatgaaattgcgcattattctaaagcttaattttgaaatgaactagtttaagtggctatcaaacccctggtttgcggtttacattatttaaattatataggaattttaatttcnggtcctggcggtaaattcnaatggcgggtccanggatggggcaatcccatggcatcgggnctttgccngcctgngaggttattaaag

SEQ ID NO: 830 - DNA, 433 bp, Artificial Sequence
  Description of Artificial sequences:primer
  misc_feature (1)..(433): 5' terminal sequence from clone image:345430. phosphoinositide-3-kinase, catalytic, alpha polypeptide(PIK3CA) gene.
  misc_feature (330)..(330): n is a, c, g, or t
cgttataaacgagaacgtgtgccatttgttttgacacaggatttcttaatagtgattagtaaaggagcccaagaatgcacaaagacaagagaatttgagaggtttcaggagatgtgttacaaggcttatctagctattcgacagcatgccaatctcttcataaatcttttctcaatgatgcttggctctggaatgccagaactacaatcttttgatgacattgcatacattcgaaagaccctagccttagataaaactgagcaagaggctttggagtatttcatgaaacaaatgaatgatgcacatcatggtggctggacaacaaaaatnggattggatcttccacacaattaaacagcatgcattgaactgaaaagataactggagaaaatgaaagctcactctgggattccacactggcactggttaataa

SEQ ID NO: 831 - DNA, 3424 bp, Artificial Sequence
  Description of Artificial sequences:primer
  misc_feature (1)..(3424): phosphoinositide-3-kinase, catalytic, alpha polypeptide(PIK3CA) gene.
aggatcagaacaatgcctccaagaccatcatcaggtgaactgtggggcatccacttgatgcccccaagaatcctagtggaatgtttactaccaaatggaatgatagtgactttagaatgcctccgtgaggctacattagtaactataaagcatgaactatttaaagaagcaagaaaataccctctccatcaacttcttcaagatgaatcttcttacattttcgtaagtgttacccaagaagcagaaagggaagaattttttgatgaaacaagacgactttgtgatcttcggctttttcaaccatttttaaaagtaattgaaccagtaggcaaccgtgaagaaaagatcctcaatcgagaaattggttttgctatcggcatgccagtgtgcgaatttgatatggttaaagatcctgaagtacaggacttccgaagaaatattcttaatgtttgtaaagaagctgtggatcttagggatcttaattcacctcatagtagagcaatgtatgtctatccgccacatgtagaatcttcaccagagctgccaaagcacatatataataaattggatagaggccaaataatagtggtgatttgggtaatagtttctccaaataatgacaagcagaagtatactctgaaaatcaaccatgactgtgtgccagaacaagtaattgctgaagcaatcaggaaaaaaactagaagtatgttgctatcatctgaacaattaaaactctgtgttttagaatatcagggcaagtacattttaaaagtgtgtggatgtgatgaatacttcctagaaaaatatcctctgagtcagtataagtatataagaagctgtataatgcttgggaggatgcccaatttgaagatgatggctaaagaaagcctttattctcaactgccaatggactgttttacaatgccatcttattccagacgcatttccacagctacaccatatatgaatggagaaacatctacaaaatccctttgggttataaatagagcactcagaataaaaattctttgtgcaacctacgtgaatctaaatattcgagacattgacaagatttatgttcgaacaggtatctaccatggaggagaacccttatgtgacaatgtgaacactcaaagagtaccttgttccaatcccaggtggaatgaatggctgaattatgatatatacattcctgatcttcctcgtgctgctcgactttgcctttccatttgctctgttaaaggccgaaagggtgctaaagaggaacactgtccattggcatggggaaatataaacttgtttgattacacagacactctagtatctggaaaaatggctttgaatctttggccagtacctcatggattagaagatttgctgaaccctattggtgttactggatcaaatccaaataaagaaactccatgcttagagttggagtttgactggttcagcagtgtggtaaagttcccagatatgtcagtgattgaagagcatgccaattggtctgtatcccgagaagcaggatttagctattcccacgcaggactgagtaacagactagctagagacaatgaattaagggaaaatgacaaagaacagctcaaagcaatttctacacgagatcctctctctgaaatcactgagcaggagaaagattttctatggagtcacagacactattgtgtaactatccccgaaattctacccaaattgcttctgtctgttaaatggaattctagagatgaagtagcccagatgtattgcttggtaaaagattggcctccaatcaaacctgaacaggctatggaacttctggactgtaattacccagatcctatggttcgaggttttgctgttcggtgcttggaaaaatatttaacagatgacaaactttctcagtatttaattcagctagtacaggtcctaaaatatgaacaatatttggataacttgcttgtgagatttttactgaagaaagcattgactaatcaaaggattgggcactttttcttttggcatttaaaatctgagatgcacaataaaacagttagccagaggtttggcctgcttttggagtcctattgtcgtgcatgtgggatgtatttgaagcacctgaataggcaagtcgaggcaatggaaaagctcattaacttaactgacattctcaaacaggagaggaaggatgaaacacaaaaggtacagatgaagtttttagttgagcaaatgaggcgaccagatttcatggatgccctacagggcttgctgtctcctctaaaccctgctcatcaactaggaaacctcaggcttaaagagtgtcgaattatgtcttctgcaaaaaggccactgtggttgaattgggagaacccagacatcatgtcagagttactgtttcagaacaatgagatcatctttaaaaatggggatgatttacggcaagatatgctaacacttcaaattattcgtattatggaaaatatctggcaaaatcaaggtcttgatcttcgaatgttaccttatggttgtctgtcaatcggtgactgtgtgggacttattgaggtggtgcgaaattctcacactattatgcaaattcagtgcaaaggcggcttgaaaggtgcactgcagttcaacagccacacactacatcagtggctcaaagacaagaacaaaggagaaatatatgatgcagccattgacctgtttacacgttcatgtgctggatactgtgtagctaccttcattttgggaattggagatcgtcacaatagtaacatcatggtgaaagacgatggacaactgtttcatatagattttggacactttttggatcacaagaagaaaaaatttggttataaacgagaacgtgtgccatttgttttgacacaggatttcttaatagtgattagtaaaggagcccaagaatgcacaaagacaagagaatttgagaggtttcaggagatgtgttacaaggcttatctagctattcgacagcatgccaatctcttcataaatcttttctcaatgatgcttggctctggaatgccagaactacaatcttttgatgacattgcatacattcgaaagaccctagccttagataaaactgagcaagaggctttggagtatttcatgaaacaaatgaatgatgcacatcatggtggctggacaacaaaaatggattggatcttccacacaattaaacagcatgcattgaactgaaagataactgagaaaatgaaagctcactctggattccacactgcactgttaataactctcagcaggcaaagaccgattgcataggaattgcacaatccatgaacagcattagatttacagcaagaacagaaataaaatactatataatttaaataatgtaaacgcaaacagggtttgatagcacttaaactagttcatttcaaaa

SEQ ID NO: 832 - DNA, 521 bp, Artificial Sequence
  Description of Artificial sequences:primer
  misc_feature (1)..(521): 3' terminal sequence from clone image:345437. chromosome 6 open reading frame 9(C6ORF9) gene.
  misc_feature (61)..(61): n is a, c, g, or t
  misc_feature (64)..(64): n is a, c, g, or t
  misc_feature (66)..(66): n is a, c, g, or t
  misc_feature (74)..(74): n is a, c, g, or t
  misc_feature (86)..(86): n is a, c, g, or t
ttccagaggggaattatatttattcacacaaccaaaacatcagacagactcagcagcagtnttntnggagggtnggcagggctganggtccattcacagcccgtaaacccctcagtctcagggatcgggggtgctggtagtgggactgggagaatagtcttaatctctcaggtgcccacccaccttcccttcttactgggaggaagggtagagctgtctctcaggttataacctctcaggtggaggcctgagccctcagaccctactgcctagtagcttgacaactggtggtgtccccacaagttagggaaaagactcccagccactccttgagatgggtgcctgggatcccccttaacttgcctcaagctccccatggacctgtgggcggggaattaaatcccctgttccatctcgcctgttcccagagttttgaaggacttttcaaccctggtccaagttcccaagggaaaggtgatgtggggagatgaataattgagaatttgtgccggggtccttta

SEQ ID NO: 833 - DNA, 483 bp, Artificial Sequence
  Description of Artificial sequences:primer
  misc_feature (1)..(483): 5' terminal sequence from clone image:345437. chromosome 6 open reading frame 9(C6ORF9) gene.
  misc_feature (1)..(1): n is a, c, g, or t
  misc_feature (189)..(189): n is a, c, g, or t
ngcagactgaactccttctggacctggtggctgaagccagtcccgccgcctggaggagcagagggccaccttctacaccccccaaaacccctcaagcctagcccctgccccactccgtcctctcgaggacagagaacagctttacagcactatcctcagtcaccagtgccagcggatggaagcccagcngtcagagcctcccctccctccaggggggcaagagctcctggagttgctgctgagagttcagggtgggggtcgaatggaggagcaaaggtcccggccccccacacacacctgctgagacttgagccccaaccagcccttccttgccactggtctcaaagctgggcagcccattgcatgccctcaactcttgcttggcagggggtaccagagactgaaagacacggcacaaatcttcaatattcatctcccacatcactttcctggggaacttggaaggggtgaaagttcctcaaa

SEQ ID NO: 834 - DNA, 1472 bp, Artificial Sequence
  Description of Artificial sequences:primer
  misc_feature (1)..(1472): chromosome 6 open reading frame 9(C6ORF9) gene.
ccggagcggggatcaccttaacttgactgtggtcccccagccctccaagaaatgcccataaaccaaggaggagagggtaaaaaatagaagaatacatggaattggggagaagaatgggaaaaaagatgggagtgactgcataatgtcagcattttgtgcttttggctcagcatttggattggatggaggattttcatcctgaaaccagccctccgtcgccaccgaccatggaataattgtcttccacgaaactcttccctggtgccaaaaagggttttatgtatatatttgagagctccacatccctggatctgaatcctccacttcccactggaaccatgcccctcccagtcccgtttctcccctctaggggatggaggctgagagaccccaggaagaagaggatggtgagcagggcccccctcaggatgaggaaggctggccccctccaaactccaccactcggccttggcgatctgctcctccatcccctcctcctccagggacccgccacacagccctgggaccccgctcggcctccctgctctccctgcagactgaactccttctggacctggtggctgaagcccagtcccgccgcctggaggagcagagggccaccttctacaccccccaaaacccctcaagcctagcccctgccccactccgtcctctcgaggacagagaacagctttacagcactatcctcagtcaccagtgccagcggatggaagcccagcggtcagagcctcccctccctccaggggggcaagagctcctggagttgctgctgagagttcagggtgggggtcgaatggaggagcaaaggtcccggccccccacacacacctgctgagacttgagccccaaccagcccttccttgccactggtctcaaagctgggcagcccattgcatgccctcaactcttgcttggcaggggtaccagagactgaaagacacggcacaaatctcaatattcatctcccacatcaccttccctgggaactggacagggtgaaagtcctcaaactctgggaacaggcgagatggaacagggatttaactccccgcccacaggtccatgggagcttgaggcagtaagggggatcccaggcacccatctcaaggagtggctgggagtcttttccctaacttgtggggacaccaccagttgtcaagctactaggcagtagggtctgagggctcaggcctccacctgagaggttataacctgagagacagctctacccttcctcccagtaagaagggaaggtgggtgggcacctgagagattaagactattctcccagtcccactaccagcacccccgatccctgagactgaggggtttacgggctgtgaatggaccttcagccctgcccaccctccctccccactgctgctgagtctgtctgatgttttggttgtgtgaataaatataattcccctctggaaaaaaaaaaaaaaaaa

SEQ ID NO: 835 - DNA, 574 bp, Artificial Sequence
  Description of Artificial sequences:primer
  misc_feature (1)..(574): 3' terminal sequence from clone image:345648. hypothetical protein flj20813(FLJ20813) gene.
  misc_feature (146)..(146): n is a, c, g, or t
  misc_feature (431)..(431): n is a, c, g, or t
  misc_feature (436)..(436): n is a, c, g, or t
  misc_feature (460)..(460): n is a, c, g, or t
  misc_feature (471)..(471): n is a, c, g, or t
  misc_feature (506)..(506): n is a, c, g, or t
  misc_feature (517)..(517): n is a, c, g, or t
  misc_feature (533)..(533): n is a, c, g, or t
  misc_feature (562)..(562): n is a, c, g, or t
tgactgtgggaaatcttttaatgaaaaaggacaccttaggaatcatcagcgagttcacactacagaaagaccctttaagtgtggggaatgtgggaaatgttttagccacaagggtaacctcattctacaccagcatggccacactngatggctaataaggctgcccttctgactaaaagatttcccgcactcctcacagggataagctgtctttccagtgtggactcgctgatgttgaataaggctgctctttcgactataagatttcccacactctccacaatcataaggtccttttgcagtgtgatctcgctgatgattactgaagctgacatatctgctaaaggattttccacaatcactgcacacataacatccatctcctaagtggaaaaagttctggtgtggaataactgagtgtttggtgctgnaggcntttgtgcgttttccacaactggtnaataggttttncccccccgaaaagggtgggccatgcatagtttcantggccggtctnctctaaaggaggttcntcttgggaaaatcctgaactgggcagaangtcccccgggcc

SEQ ID NO: 836 - DNA, 463 bp, Artificial Sequence
  Description of Artificial sequences:primer
  misc_feature (1)..(463): 5' terminal sequence from clone image:345648. hypothetical protein flj20813(FLJ20813) gene.
  misc_feature (1)..(1): n is a, c, g, or t
  misc_feature (79)..(79): n is a, c, g, or t
ngacgttctgcccagttcaggattgtgccaagaagaagctgctgtagagaagacagacagtgaaactatgcatggcccnccctttcaggagggaaaaactaattacagttgtggaaaacgcacaaaagccttcagcaccaaacactcagttattccacaccagaaacttttcactagagatcggatgttatgtgtgcagtgattgtggaaaatcctttagcagatatgtcagcttcagtaatcatcagcgagatcacactgcaaaaggaccttatgattgtggagagtgtgggaaatcttatagtcgaaagagcagccttattcaacatcagcgagtccacactggaaagacagcttatccctgtgaggagtgcgggaaatcttttagtcagaagggcagccttattagccatcagtgtggccatgctggtgtagaatgaggttacccttgtggctaaaacat

SEQ ID NO: 837 - DNA, 3554 bp, Artificial Sequence
  Description of Artificial sequences:primer
  misc_feature (1)..(3554): hypothetical protein flj20813(FLJ20813) gene.
gtggcccctgagtgctgggtgggaccgcggtgactgaacctagaaggtggagaggaatcgtcctcggtgcccagaggcggctctgcagccccgtgacggcgaccactgctcccgggccgtgcttccccaagtagtccgatggcagcggctgtgccgaggcgcccaactcagcagggcactgtgacctttgaagatgtggctgtgaacttttcccaggaggagtggtgtcttcttagtgaggctcagaggtgcttgtaccgtgatgtgatgctagagaacctggctctcatatcctcgctgggttgttggtgtggatcaaaagatgaggaggcaccttgtaagcagagaatttctgtacaaagagagtctcagagcaggactcctagggcaggtgtttctcctaagaaggctcacccctgtgaaatgtgtggcctcatcttggaggatgtttttcactttgctgaccaccaggaaactcatcacaagcagaagctgaacaggagtggagcatgtggaaaaaacttggatgacactgcataccttcatcagcaccagaagcagcatattggagagaaattctacagaaagagtgtcagagaagcatcgtttgtaaagaaacgtaagctcagggtgtcacaggagccatttgtcttccgcgagtttgggaaggacgttctgcccagttcaggattgtgccaagaagaagctgctgtagagaagacagacagtgaaactatgcatggcccaccctttcaggagggaaaaactaattacagttgtggaaaacgcacaaaagccttcagcaccaaacactcagttattccacaccagaaacttttcactagagatggatgttatgtgtgcagtgattgtggaaaatcctttagcagatatgtcagcttcagtaatcatcagcgagatcacactgcaaaaggaccttatgattgtggagagtgtgggaaatcttatagtcgaaagagcagccttattcaacatcagcgagtccacactggacagacagcttatccctgtgaggagtgcgggaaatcttttagtcagaagggcagccttattagccatcagcttgttcacactggagaagggccttatgagtgtagagaatgtgggaaatcttttggtcaaaagggtaacctcattcaacatcagcaaggtcacactggagagagagcttatcactgtggggaatgtgggaaatcttttcgtcagaagttctgctttattaaccatcagcgtgttcacactggagaaaggccttacaagtgtggagaatgtgggaaatcttttggtcaaaagggcaacctcgttcaccatcagcgaggtcatactggagaaaggccctatgagtgcaaggaatgtgggaaatcatttaggtacagatcccacctcactgaacaccagagacttcacactggggaaagaccttacaattgtagggaatgtgggaaattatttaacaggaagtatcatcttctagttcatgagagagttcacactggagaaaggccatatgcgtgtgaggtatgtgggaaattatttggcaataagcacagcgtgactatacatcagaggattcacactggagaaaggccgtatgaatgcagtgaatgtgggaaatcatttctttccagctctgcgcttcatgttcataaaagagttcattctggacaaaagccttataagtgcagtgaatgtggaaaatccttttctgaatgttccagtctcattaaacacaggagaattcacactggagaaaggccttatgaatgcaccaaatgtggaaaaacatttcagcgaagctctaccctccttcatcatcagagttcacacaggagaaaggccttatgagtacacaccaccacgcccagctaatttttgtgtttttagtggggatggggttttaccatgttggccaggctggtctcaaactcctgacctcaagtgatccacccgccttgactcccaaagtgctgaaattacaggcatgagcctctgcacctggccttcattcttttcgtattgcttagaatatgacatgctgaaccaggcatggtggctcatgcttgtaaacctgatgctttgggaggacaaggtggttcattggaggccaggagttggagatcagcctgggcaacatggccagacctcctctctacaaaaagaaaaaagaatgacatgcttcttgtttttgtctgttataaatgaaactgctatatttgaatgcagttgttcatgtaggtatgtttcactatggtaatatggtggtgtgcagtgcctgagtcacgtgatagattaaagtacaactcttttttgagacagagtctcactctgtcacccaggcgggagttaggtggcatgatttcggctcactgcaacctctgcctcccaagttcaactgattcttctgcctcagcctcccgagtagcagggattaccggtgtgcaccaccatgcctggataacttttttttttatttctattagcaatggggtttcaccatgctggccaggcttgttatgaactgacctcaagtgatctgcctgcctcagcttctcaggtgtgacctactgtgcttggcctaatgtacaactttttaagcaatgccaaactatgacttaagaatgaaattattgctcatttgtatatctatctaccatcagtgtccaagaatttctgttctatcttaccaagagggagtatggttagtatttgaaattgtttattattttaataagtggttataacttttgagtcagtggtttatgttttgcattttttttgttttgagacagagtctcgctctgtctcccaggctagagtaccgtggcacaatctcggctcattgcaacctctgcttcctgggctcaagcactctgcccacctcagcctccagagtagctggaaatacagtgccacccagatagcctcacaaaactttgacccagccactgttagtgtcgccaccgcccataaaggagctgagcccagcaggggcactgcctggggccctgtagccaaaaggctacagcaggagctgatgaccctcatgatgcctggtgacaaaagaatttctgcctaccctgaaagccttatcaaatggacaccatccatgaagcagctggcacagtgtatgaagatctgaggtataagctcttgctggagttcctcaatgactacccacctttacgatgcacccacagtgaagttcctcacaccctgctaccaccctaacgtggacacccagggtaacatatgcctggacatcctgaaggagaagtggtctgccccgtatgatatcaggaccatcctgctctctatccagtgcctgctaggacaactcaacattgatagccctttgaacacacatgctaccaagctctgggaaaaccccatagctttaagaagtacctgcaagggtcaggcgcagtggctcacacctgtaatcccagcactttgggaggccgaggtgggtggatggatcacctgacgtagagagtccaaggcctgacaaacatggagaaatgtcatccctattt

SEQ ID NO: 838 - DNA, 374 bp, Artificial Sequence
  Description of Artificial sequences:primer
  misc_feature (1)..(374): 3' terminal sequence from clone image:345676. ribosomal protein s21(RPS21) gene.
  misc_feature (99)..(99): n is a, c, g, or t
  misc_feature (108)..(108): n is a, c, g, or t
  misc_feature (258)..(258): n is a, c, g, or t
  misc_feature (336)..(336): n is a, c, g, or t
tttttttttttttttttaggttttcattatttatttatgacaaatattccacatctgtgattctctccagtcaaaagttctttgagacgatgccatcgncttggcaantcggagaatggaatcatctgactcacccatcctacgaatggccccgcagatagcataagttttaaactggccattaaacctgcctgtgaccttgtcaacctcggccacgttcatctggatggatgcgtggtccttggcaccgatgatgcnattgctaagcggcatgttccgcggcacgtacaggtccacgaactcgccggcgtcgttctgcatttcgaggctgggctngcgctagctggccaccacaccgcgcgcgagagagaaag

SEQ ID NO: 839 - DNA, 383 bp, Artificial Sequence
  Description of Artificial sequences:primer
  misc_feature (1)..(383): 5' terminal sequence from clone image:345676. ribosomal protein s21(RPS21) gene.
  misc_feature (75)..(75): n is a, c, g, or t
  misc_feature (313)..(313): n is a, c, g, or t
cgccgatatctctgccgggtgactagctgcttcctttctctctcgcgcgcggtgtggtggcagcaggcgcaccangcctcgaaatgcagaacgacgccggcgagttcgtggacctgtacgtgccgcggaaatgctccgctagcaatcgcatcatcggtgccaaggaccacgcatccatccagatgaacgtggccgaggttgacaaggtcacaggcaggtttaatggccagtttaaaacttatgctatctgcggggccattcgtaggatgggtgagtcagatgattccattctccgattggccaaggcgactgnaatcgtctcaaagaacttttgactggagagaatcacagatgtggaatatttgtcataaataaataattga

SEQ ID NO: 840 - DNA, 356 bp, Artificial Sequence
  Description of Artificial sequences:primer
  misc_feature (1)..(356): ribosomal protein s21(RPS21) gene.
ctttctctctcgcgcgcggtgtggtggcagcaggcgcagcccagcctcgaaatgcagaacgacgccggcgagttcgtggacctgtacgtgccgcggaaatgctccgctagcaatcgcatcatcggtgccaaggaccacgcatccatccagatgaacgtggccgaggttgacaaggtcacaggcaggtttaatggccagtttaaaacttatgctatctgcggggccattcgtaggatgggtgagtcagatgattccattctccgattggccaaggccgatggcatcgtctcaaagaacttttgactggagagaatcacagatgtggaatatttgtcataaataaataatgaaaacct

SEQ ID NO: 841 - DNA, 639 bp, Artificial Sequence
  Description of Artificial sequences:primer
  misc_feature (1)..(639): 3' terminal sequence from clone image:345694.
  misc_feature (332)..(332): n is a, c, g, or t
  misc_feature (342)..(342): n is a, c, g, or t
  misc_feature (366)..(366): n is a, c, g, or t
  misc_feature (398)..(398): n is a, c, g, or t
  misc_feature (469)..(469): n is a, c, g, or t
  misc_feature (473)..(473): n is a, c, g, or t
  misc_feature (497)..(497): n is a, c, g, or t
  misc_feature (514)..(514): n is a, c, g, or t
  misc_feature (527)..(527): n is a, c, g, or t
  misc_feature (576)..(576): n is a, c, g, or t
  misc_feature (580)..(580): n is a, c, g, or t
  misc_feature (588)..(588): n is a, c, g, or t
  misc_feature (590)..(590): n is a, c, g, or t
  misc_feature (593)..(593): n is a, c, g, or t
  misc_feature (600)..(600): n is a, c, g, or t
  misc_feature (613)..(613): n is a, c, g, or t
  misc_feature (621)..(621): n is a, c, g, or t
  misc_feature (632)..(632): n is a, c, g, or t
aattttgaatgtatttttaaatttattttttcaaaataatgacattagtaaaaattttacatagcctgtattgaattcacacattcaaatgaggctttaccagtaatgatggggattaatacagagctagtgtttggcatttgactttatctcaaatcgagctaactgctcaatgaattacagaagactcatactctttttattttttcctggaaattaaaaaagaaaagctttactaaatattgacatatatatttactccaaattttacatttacgtgaaataagaatatctctagtagctcagttaacatcaacagaaagcttcaaaangatggattcngaaaatgggcaggcaaaattttcnttttattggtaggcaatttacttaaactgggnaatttgggctttatgcataataagtcatgtggggtaaaacatccacattgcagttagggttcccggtatcnagcntttatttattttttagccatggcntttaccagattttgccngggtataaaatgnggggccttcctggggaaatacctataggttccgagttggaatggcagancgcncgtagacncntcnggagggngggtggccggacncccagacngggccgggtgnccgaaaa

SEQ ID NO: 842 - DNA, 233 bp, Artificial Sequence
  Description of Artificial sequences:primer
  misc_feature (1)..(233): 5' terminal sequence from clone image:345694.
  misc_feature (61)..(61): n is a, c, g, or t
  misc_feature (119)..(119): n is a, c, g, or t
  misc_feature (138)..(138): n is a, c, g, or t
  misc_feature (187)..(187): n is a, c, g, or t
  misc_feature (191)..(191): n is a, c, g, or t
  misc_feature (205)..(205): n is a, c, g, or t
  misc_feature (211)..(211): n is a, c, g, or t
  misc_feature (221)..(221): n is a, c, g, or t
  misc_feature (230)..(230): n is a, c, g, or t
gcaaattccccggattaaaaggttccctggttgtgaaaatacatgagataaatcatgaagnccactatcatcctccttctgcttgcacaagtttcctgggctggaccgtttcaacaganaggcttatttgactttatnctagaagattatgcttctgggataaggcccagaagttcctgatgaccgngacnttcgagccctcccntaaggnccagtggtgnccctttccngct

SEQ ID NO: 843 - DNA, 486 bp, Artificial Sequence
  Description of Artificial sequences:primer
  misc_feature (1)..(486): 3' terminal sequence from clone image:345706. carbonic anhydrase iii, muscle specific(CA3) gene.
  misc_feature (421)..(421): n is a, c, g, or t
tccatttatgtctttattggttctggtgatcagtacaactgctttgacttcaagtgtcatcattcactcttttgtgttctagtgatcattcattccagcctccagtgagaaacacaacagaggcagtttttattttaataatcatgcaaagaaaaatgtagtcgaaattaaaaataaatggccctccttcaggtaaagaaaaatactaggataaattcaactacatttatgaagaagaaattcaaatactgaatcaaaaatttgaaaactcctgattgtattgtgttttcttttcactggtaatcaaaaccaagtaatcttagtagctaaaacttcaataaatgactgacttcttgctggtgttaagagttaaaacatattattagctcaattcttgctgtctatagtcattttaatttcnggcttatgtttaattggttatatgatcttcatacacctctactacatggtagaattactccatat

SEQ ID NO: 844 - DNA, 436 bp, Artificial Sequence
  Description of Artificial sequences:primer
  misc_feature (1)..(436): 5' terminal sequence from clone image:345706. carbonic anhydrase iii, muscle specific(CA3) gene.
  misc_feature (84)..(84): n is a, c, g, or t
  misc_feature (130)..(130): n is a, c, g, or t
  misc_feature (198)..(198): n is a, c, g, or t
atgcattggacaagattaagacaaagggcaaggaggcgcccttcacaaagtttgacccatcctgcctgttcccggcatgcgacntaactggacctaccagggctcattcaccacgccgccctgcgagaantgcattgtgtggctgctgctgaaggagcccatgaccgtgagctctgaccagatggccaagctgcgganctcctctccagtgctgagaacgagcccccagtgcctcttgtgagcaactggcgacctccacagcctatcaataacagggtggtgagagcttccttcaaatgaggctgctggatcttgccctcttcaggaaaggaaacctaccattggagagcttggttccttgcctccttctggtgctccttactccaagtctatttcatttttccacactgagcaatgaatgtgagagatgtggtca

SEQ ID NO: 845 - DNA, 2357 bp, Artificial Sequence
  Description of Artificial sequences:primer
  misc_feature (1)..(2357): carbonic anhydrase iii, muscle specific(CA3) gene.
tccggaccctttcttcccatcctttgctcctaggattttacatgttgcctgcaaagggagtcaaacttagggggcaggcaaacaaacgagttctttccagcctctgtaaccggatcgctagagcgaaataaactcgcacaagtgtccagagatcgtagccagacagccagcctgcgcttgaacgaacttttaagtgaggctgcaagagccgccgggatgtagattttagttcgtggccaagcacaactacgacgatcctgtccctgccccaccccatccccaagaatgcatggaggaaggagagaggaagcaggtgagggccgcctgcatttctgcacgtcggcgccggttagaaaccctgcagttttgagagagaagaagaggagatggaggggccaggagccacgactcccgggagagcgcagggaggggcgtgggtgccccttcgcccacctccgcccccgtcacctcgacagctgtcccgctcttggaattcattggcttcctctacccggcctcccaaacaccaccccaatctagtttagccccccgccccaccctcgctgacctaataaggccatgcaagtgtgcgggggagctacataaaagcgcgggctcgcgccgactctgcaccacgcaggggaagagaaagcaggagccgtccagcacggaggaaggcgaccatggccaaggagtggggctacgccagtcacaacggtcctgaccactggcatgaacttttcccaaatgccaagggggaaaaccagtcgcccgttgagctgcatactaaagacatcaggcatgacccttctctgcagccatggtctgtgtcttatgatggtggctctgccaagaccatcctgaataatgggaagacctgccgagttgtatttgatgatacttatgataggtcaatgctgagagggggtcctctccctggaccctaccgacttcgccagtttcatcttcactggggctcttcggatgatcatggctctgagcacaccgtggatggagtcaagtatgcagcggagcttcatttggttcactggaacccgaagtataacacttttaaagaagccctgaagcagcgcgatgggatcgctgtgattggcatttttctgaagataggacatgagaatggcgagttccagattttccttgatgcattggacaagattaagacaaagggcaaggaggcgcccttcacaaagtttgacccatcctgcctgttcccggcatgccgggactactggacctaccagggctcattcaccacgccgccctgcgaggaatgcattgtgtggctgctgctgaaggagcccatgaccgtgagctctgaccagatggccaagctgcggagcctcctctccagtgctgagaacgagcccccagtgcctcttgtgagcaactggcgacctccacagcctatcaataacagggtggtgagagcttccttcaaatgaggctgctggatcttgccctcttcaggaaaggaaacctaccattggagagcttggttccttgcctccttctggtgctcttactccaagtctatttcatttttccacactgagcaatgaatgtgagagatgtggtcaccaagatctaagttacttgttgaaagaaagttactttcgacaagatctaatatgaaagcatagatttcacatttgatctctgtaataatcatctttcctataaaagtagcatttttggtaaagtttcaaagaagaagaaacagagatggaagagtaaagatatttttaaaatggctagctattgggcaccagtttttctgttatctaaaatttcacacaacttcatgtttttatttttatattatgagttgtccatcttaaagaaatatgagtaattctacatgtagtagaggtgtatgaagatcatataacaattaaacataagccagaaattaaaatgactatagacagcaagaattgagctaataatatgttttaactcttaacaccagcaagaagtcagtcatttattgaagttttagctactaagattacttggttttgattaccagtgaaaagaaaacacaatacaatcaggagttttcaaatttttgattcagtatttgaatttcttcttcataaatgtagttggaatttatcctagtatttttctttacctgaaggagggccatttatttttaatttcactacatttttctttgcatgattattaaaataaaaactgcctctgttgtgtttctcactggaggctggaatgaatgatcactagaacacaaaagagtgaatgatgacacttgaagtcaaagcagttgtactgatcaccagaaccaataaagacataaatggaaaacgttg

SEQ ID NO: 846 - DNA, 437 bp, Artificial Sequence
  Description of Artificial sequences:primer
  misc_feature (1)..(437): 3' terminal sequence from clone image:346016. procollagen-proline, 2-oxoglutarate 4-dioxygenase (proline 4-hydroxylase), alpha polypeptide i(P4HA1) gene.
  misc_feature (396)..(396): n is a, c, g, or t
  misc_feature (399)..(399): n is a, c, g, or t
ttttttaactcaagtacgtttaattcaccacagaggagctaaaagaaaagagagggggttggtaaaatacagtatactttctttaaaaaagacttgggaggaaaaaaatcaacttagaagatcatatgaaagggcaatcacatggaacccagttagtgtcctagtttattactagtcttcagatccagaaaacagagtaagacactaggtaaacagaacacctaggcacatctgtaaggcatttgtttcctatcacacagcccattctagcttaacacccaccaactgagatgtagtgaaatactaaaactggatgctcaaattatgtttttatccaaccaaaaagttctttaaatataaaattcccccacttttaaactctggccctgggcttcnggnggatacccacaggacttttaagggtttatggcaatatg

SEQ ID NO: 847 - DNA, 460 bp, Artificial Sequence
  Description of Artificial sequences:primer
  misc_feature (1)..(460): 5' terminal sequence from clone image:346016. procollagen-proline, 2-oxoglutarate 4-dioxygenase (proline 4-hydroxylase), alpha polypeptide i(P4HA1) gene.
  misc_feature (45)..(46): n is a, c, g, or t
atttcggaacgagggggaaatagaattgctacatggctgttttanntgagtgatgtgtctgcaggaggagccactgtttttcctgaagttggagctagtgtttggcccaaaaaaggaactgctgttttctggtataatctgtttgccagtggagaaggagattatagtacacggcatgcagcctgtccagtgctagttggcaacaaatgggtatccaataaatggctccatgaacgtggacaagaatttcgaagaccttgtacgttgtcagaattggaatgacaaacaggcttccctttttctcctattgttgtactcttatgtgtctgatatacacatttcctagtcttaactttcaggagtttacaattgactaacactccatgattgattcagtcatgaacctcatcccatgtttcatctgtggacaattgcttactttgtgggttcttttaaaagt

SEQ ID NO: 848 - DNA, 2722 bp, Artificial Sequence
  Description of Artificial sequences:primer
  misc_feature (1)..(2722): procollagen-proline, 2-oxoglutarate 4-dioxygenase (proline 4-hydroxylase), alpha polypeptide i(P4HA1) gene.
gagcgggctgagggtaggaagtagccgctccgagtggaggcgactgggggctgaagagcgcgccgccctctcgtcccactttccaggtgtgtgatcctgtaaaattaaatcttccaagatgatctggtatatattaattataggaattctgcttccccagtctttggctcatccaggcttttttacttcaattggtcagatgactgatttgatccatactgagaaagatctggtgacttctctgaaagattatattaaggcagaagaggacaagttagaacaaataaaaaaatgggcagagaagttagatcggctaactagtacagcgacaaaagatccagaaggatttgttgggcatccagtaaatgcattcaaattaatgaaacgtctgaatactgagtggagtgagttggagaatctggtccttaaggatatgtcagatggctttatctctaacctaaccattcagagaccagtactttctaatgatgaagatcaggttggggcagccaaagctctgttacgtctccaggatacctacaatttggatacagataccatctcaaagggtaatcttccaggagtgaaacacaaatcttttctaacggctgaggactgctttgagttgggcaaagtggcctatacagaagcagattattaccatacggaactgtggatggaacaagccctaaggcaactggatgaaggcgagatttctaccatagataaagtctctgttctagattatttgagctatgcggtatatcagcagggagacctggataaggcacttttgctcacaaagaagcttcttgaactagatcctgaacatcagagagctaatggtaacttaaaatattttgagtatataatggctaaagaaaaagatgtcaataagtctgcttcagatgaccaatctgatcagaaaactacaccaaagaaaaaaggggttgctgtggattacctgccagagagacagaagtacgaaatgctgtgccgtggggagggtatcaaaatgacccctcggagacagaaaaaactcttttgccgctaccatgatggaaaccgtaatcctaaatttattctggctccagctaaacaggaggatgaatgggacaagcctcgtattattcgcttccatgatattatttctgatgcagaaattgaaatcgtcaaagacctagcaaaaccaaggctgagccgagctacagtacatgaccctgagactggaaaattgaccacagcacagtacagagtatctaagagtgcctggctctctggctatgaaaatcctgtggtgtctcgaattaatatgagaatacaagatctaacaggactagatgtttccacagcagaggaattacaggtagcaaattatggagttggaggacagtatgaaccccattttgactttgcacggaaagatgagccagatgctttcaaagagctggggacaggaaatagaattgctacatggctgttttatatgagtgatgtgtctgcaggaggagccactgtttttcctgaagttggagctagtgtttggcccaaaaaaggaactgctgttttctggtataatctgtttgccagtggagaaggagattatagtacacggcatgcagcctgtccagtgctagttggcaacaaatgggtatccaataaatggctccatgaacgtggacaagaatttcgaagaccttgtacgttgtcagaattggaatgacaaacaggcttccctttttctcctattgttgtactcttatgtgtctgatatacacatttccatagtcttaactttcaggagtttacaattgactaacactccatgattgattcagtcatgaacctcatcccatgtttcatctgtggacaattgcttactttgtgggttcttttaaaagtaacacgaaatcatcatattgcataaaaccttaaagttctgttggtatcacagaagacaaggcagagtttaaagtgaggaattttatatttaaagaactttttggttggataaaaacataatttgagcatccagttttagtatttcactacatctcagttggtgggtgttaagctagaatgggctgtgtgataggaaacaaatgccttacagatgtgcctaggtgttctgtttacctagtgtcttactctgttttctggatctgaagactagtaataaactaggacactaactgggttccatgtgattgccctttcatatgatcttctaagttgatttttttcctcccaagtcttttttaaagaaagtatactgtattttaccaaccccctctcttttcttttagctcctctgtggtgaattaaacgtacttgagttaaaatatttcgattttttttttttttttaatggaaagtcctgcataacaacactgggccttcttaactaaaatgctcaccacttagcctgtttttttatcccttttttaaaatgacagatgattttgttcaggaattttgctgtttttcttagtgctaataccttgcctcttattcctgctacagcagggtggtaatattggcattctgattaaatactgtgccttaggagactggaagtttaaaaatgtacaagtcctttcagtgatgagggaattgattttttttaaaagtctttttcttagaaagccaaaatgtttgtttttttaagattctgaaatgtgttgtgacaacaatgacctatttatgatcttaaatctttttt

SEQ ID NO: 849 - DNA, 479 bp, Artificial Sequence
  Description of Artificial sequences:primer
  misc_feature (1)..(479): 3' terminal sequence from clone image:346269. collagen, type vi, alpha 2(COL6A2) gene.
  misc_feature (83)..(83): n is a, c, g, or t
  misc_feature (85)..(85): n is a, c, g, or t
  misc_feature (122)..(122): n is a, c, g, or t
  misc_feature (135)..(135): n is a, c, g, or t
  misc_feature (154)..(154): n is a, c, g, or t
  misc_feature (162)..(162): n is a, c, g, or t
  misc_feature (167)..(167): n is a, c, g, or t
  misc_feature (193)..(193): n is a, c, g, or t
  misc_feature (217)..(217): n is a, c, g, or t
  misc_feature (308)..(308): n is a, c, g, or t
  misc_feature (377)..(377): n is a, c, g, or t
  misc_feature (410)..(410): n is a, c, g, or t
  misc_feature (427)..(427): n is a, c, g, or t
  misc_feature (461)..(461): n is a, c, g, or t
  misc_feature (472)..(472): n is a, c, g, or t
tcgggttcaaagcctttattcgggtcagggcttgctccagagctcaggggccaggtaggtcaggagccttgggatggctgcangnggagggaggccgggcagcctgcggagggcctgggganacctggggctggncgggggcggggctacgggnaccccgtngggancgagctggagaggtgcaggcccaggncgtcgtccgagtgagcagcggtcntggccgtttgggacccgggcccgcttagcaccatggacggggtgggctcacgaccctcgactgcggggcccgggcggcggcgctacaagantccaagcggatgaagcggtcgaagaagccgggtttgctccaggctgtcataatccttctcgtggaacanggcggcacggtcacccaggcttgagcgtggttnaacacgtccatgtccangtcgctgcccaaggccagcacggtggggtaacanggttctgcttncgcattt

SEQ ID NO: 850 - DNA, 401 bp, Artificial Sequence
  Description of Artificial sequences:primer
  misc_feature (1)..(401): 5' terminal sequence from clone image:346269. collagen, type vi, alpha 2(COL6A2) gene.
  misc_feature (171)..(171): n is a, c, g, or t
aattcttgagccatgaaaggatgctttgggccccttccctcccaggaggcagcctgtgcagggatggtgctcagcaggtggacagggcctgggctgtcgtcagggtctcaggcctgggagcaccagcagaggagatggcggctcccagcagtgccgctggaaagtgacttnggctaaggacccacacccagggctgccctgcagaaacgcccccgcagagcccagtggtctgtgaggttgcaggcagggtgcgaatggaagggcacaggtgcggggctggcacctgcccggtcctgcccacctcccctccgcccagcccgcacctgcgtctccccacagagctgtccgtggcacagtgcacgcagcggcccgtggacatcgtcttccttgctggacgggct

SEQ ID NO: 851 - DNA, 3439 bp, Artificial Sequence
  Description of Artificial sequences:primer
  misc_feature (1)..(3439): collagen, type vi, alpha 2(COL6A2) gene.
gcgcccgcgcctcgggccgtcgggagcggagcctcctcgggaccaggacttcagggccacaggtgctgccaagatgctccagggcacctgctccgtgctcctgctctggggaatcctgggggccatccaggcccagcagcaggaggtcatctcgccggacactaccgagagaaacaacaactgcccagagaagaccgactgccccatccacgtgtacttcgtgctggacacctcggagagcgtcaccatgcagtcccccacggacatcctgctcttccacatgaagcagttcgtgccgcagttcatcagccagctgcagaacgagttctacctggaccaggtggcgctgagctggcgctacggcggcctgcacttctctgaccaggtggaggtgttcagcccaccgggcagcgaccgggcctccttcatcaagaacctgcagggcatcagctccttccgccgcggcaccttcaccgactgcgcgctggccaacatgacggagcagatccggcaggaccgcagcaagggcaccgtccacttcgccgtggtcatcaccgacggccacgtcaccggcagcccctgcgggggcatcaagctgcaggccgagcgggcccgcgaggagggcatccggctcttcgccgtggcccccaaccagaacctgaaggagcagggcctgcgggacatcgccagcacgccgcacgagctctaccgcaacgactacgccaccatgctgcccgactccaccgagatcaaccaggacaccatcaaccgcatcatcaaggtcatgaaacacgaagcctacggagagtgctacaaggtgagctgcctggaaatccctgggccctctgggcccaagggctaccgtggacagaagggtgccaagggcaacatgggtgagccgggagagcctggccagaagggaagacagggagacccgggcatcgaaggccccattggattcccaggacccaagggcgttcctggcttcaaaggagagaagggtgaatttggagccgacggtcgcaagggggcccctggcctggctggcaagaacgggaccgatggacagaagggcaagctggggcgcatcggacctcctggctgcaagggagaccctggaaaccggggccccgacggttacccgggggaagcagggagtccaggggagcgaggagaccaaggcggcaagggggaccctggccgcccaggacgcagagggcccccgggagaaatcggggccaagggaagcaaggggtatcaaggcaacaatggagccccaggaagtcctggtgtgaaaggagccaagggcgggcctgggccccgcggacccaaaggcgagccggggcgcaggggagaccccggcaccaagggcagcccaggcagcgatggccccaagggggagaagggggaccctggccctgagggcccccgcggcctggctggagaggttggcaacaaaggagccaagggagaccgaggcttgcctggacccagaggcccccagggagctcttggggagcccggaaagcagggatctcggggagaccccggtgatgcaggaccccgtggagactcaggacagccaggccccaagggagaccccggcaggcctggattcagctacccaggaccccgaggagcacccggagaaaaaggcgagcccggcccacgcggccccgagggaggccgaggcgactttggcttgaaaggagaacctgggaggaaaggagagaaaggagagcctgcggatcctggtccccctggtgagccaggccctcgggggccaagaggagtcccaggacccgagggtgagcccggcccccctggagaccccggtctcacggagtgtgacgtcatgacctacgtgagggagacctgcgggtgctgcgactgtgagaagcgctgtggcgccctggacgtggtcttcgtcatcgacagctccgagagcattgggtacaccaacttcacactggagaagaacttcgtcatcaacgtggtcaacaggctgggtgccatcgctaaggaccccaagtccgagacagggacgcgtgtgggcgtggtgcagtacagccacgagggcacctttgaggccatccagctggacgacgaacatatcgactccctgtcgagcttcaaggaggctgtcaagaacctcgagtggattgcgggcggcacctggacaccctcagccctcaagtttgcctacgaccgcctcatcaaggagagccggcgccagaagacacgtgtgtttgcggtggtcatcacggacgggcgccacgaccctcgggacgatgacctcaacttgcgggcgctgtgcgatcgcgacgtcacagtgacggccatcggcatcggggacatgttccacgagaagcacgagagtgaaaacctctactccatcgcctgcgacaagccacagcaggtgcgcaacatgacgctgttctccgacctggtcgctgagaagttcatcgatgacatggaggacgtcctctgcccggaccctcagatcgtgtgcccagaccttccctgccaaacagagctgtccgtggcacagtgcacgcagcggcccgtggacatcgtcttcctgctggacggctccgagcggctgggtgagcagaacttccacaaggcccggcgcttcgtggagcaggtggcgcggcggctgacgctggcccggagggacgacgaccctctcaacgcacgcgtggcgctgctgcagtttggtggccccggcgagcagcaggtggccttcccgctgagccacaacctcactgccatccacgaggcgctggagaccacacaatacctgaactccttctcgcacgtgggcgcaggcgtggtgcacgccatcaatgccatcgtgcgcagcccgcgtggcggggcccggaggcacgcagagctgtccttcgtgttcctcacggacggcgtcacgggcaacgacagtctgcacgagtcggcgcactccatgcgcaagcagaacgtggtacccaccgtgctggccttgggcagcgacgtggacatggacgtgctcaccacgctcagcctgggtgaccgcgccgccgtgttccacgagaaggactatgacagcctggcgcaacccggcttcttcgaccgcttcatccgctggatctgctagcgccgccgcccgggccccgcagtcgagggtcgtgagcccaccccgtccatggtgctaagcgggcccgggtcccacacggccagcaccgctgctcactcggacgacgccctgggcctgcacctctccagctcctcccacggggtccccgtagccccggcccccgcccagccccaggtctccccaggccctccgcaggctgcccggcctccctccccctgcagccatcccaaggctcctgacctacctggcccctgagctctggagcaagccctgacccaataaaggctttgaacccaaaaaaaaaaa

SEQ ID NO: 852 - DNA, 414 bp, Artificial Sequence
  Description of Artificial sequences:primer
  misc_feature (1)..(414): 3' terminal sequence from clone image:346610. stratifin(SFN) gene.
  misc_feature (163)..(163): n is a, c, g, or t
  misc_feature (265)..(265): n is a, c, g, or t
  misc_feature (272)..(272): n is a, c, g, or t
  misc_feature (314)..(314): n is a, c, g, or t
gagtgtcacaggggaactttattgagaggaaacatggtcacacccagcagacatgctttccctcaatctcggtcttgcactggcgcgcgcacacacacacacacacacacacacacacacccatctccagcccctgccactgtccagttctcagccacaaggngcgacactcctcaattcctacgatcagaggcagcaggggcaggagggaggcaagaggaggggagaagtagcctggtcctggggtcgggaggaagcgggtgcngagaganggggtgggggcatgaccagtggttaggtgcgctcaacagctngcaagaagagtgggatccccagccccaggtggcctcagctctgccagtccctctccacggagccctttggagcaagaacagcgcctaggggagaagggtg

SEQ ID NO: 853 - DNA, 453 bp, Artificial Sequence
  Description of Artificial sequences:primer
  misc_feature (1)..(453): 5' terminal sequence from clone image:346610. stratifin(SFN) gene.
  misc_feature (201)..(201): n is a, c, g, or t
  misc_feature (323)..(323): n is a, c, g, or t
  misc_feature (349)..(349): n is a, c, g, or t
  misc_feature (365)..(365): n is a, c, g, or t
  misc_feature (375)..(375): n is a, c, g, or t
  misc_feature (453)..(453): n is a, c, g, or t
agcccgccgcccgcctgtgtgtccccagagccatggagagagccagtctgatccagaaggccaagctggcagagcaggccgaacgctatgaggacatggcagccttcatgaaaggcgccgtggagaagggcgaggagctctcctgcgaagagcgaaacctgctctcagtagcctataagaacgtggtgggcggccagaggnctgctgcgagggtgctgtccagtattgagcagaaaagcaacgaggagggctcgtaggagaaggggcccgacggtgcgtgagtaccgggagaaggtggagactgagctccaagggcgtgtgcnacaccgtgctgggcctgctgggacanccacctcatcaaggangccggggacnccgagagccgggtcttcttacctgaagatgaagggtgactacttaccgctacctggccgaggtggcaccggtgacgan

SEQ ID NO: 854 - DNA, 1320 bp, Artificial Sequence
  Description of Artificial sequences:primer
  misc_feature (1)..(1320): stratifin(SFN) gene.
gagagacacagagtccggcattggtcccaggcagcagttagcccgccgcccgcctgtgtgtccccagagccatggagagagccagtctgatccagaaggccaagctggcagagcaggccgaacgctatgaggacatggcagccttcatgaaaggcgccgtggagaagggcgaggagctctcctgcgaagagcgaaacctgctctcagtagcctataagaacgtggtgggcggccagagggctgcctggagggtgctgtccagtattgagcagaaaagcaacgaggagggctcggaggagaaggggcccgaggtgcgtgagtaccgggagaaggtggagactgagctccagggcgtgtgcgacaccgtgctgggcctgctggacagccacctcatcaaggaggccggggacgccgagagccgggtcttctacctgaagatgaagggtgactactaccgctacctggccgaggtggccaccggtgacgacaagaagcgcatcattgactcagcccggtcagcctaccaggaggccatggacatcagcaagaaggagatgccgcccaccaaccccatccgcctgggcctggccctgaacttttccgtcttccactacgagatcgccaacagccccgaggaggccatctctctggccaagaccactttcgacgaggccatggctgatctgcacaccctcagcgaggactcctacaaagacagcaccctcatcatgcagctgctgcgagacaacctgacactgtggacggccgacaacgccggggaagaggggggcgaggctccccaggagccccagagctgagtgttgcccgccaccgccccgccctgccccctccagtcccccaccctgccgagaggactagtatggggtgggaggccccacccttctcccctaggcgctgttcttgctccaaagggctccgtggagagggactggcagagctgaggccacctggggctggggatcccactcttcttgcagctgttgagcgcacctaaccactggtcatgcccccacccctgctctccgcacccgcttcctcccgaccccaggaccaggctacttctcccctcctcttgcctccctcctgcccctgctgcctctgatcgtaggaattgaggagtgtcccgccttgtggctgagaactggacagtggcaggggctggagatgggtgtgtgtgtgtgtgtgtgtgtgtgtgtgtgcgcgcgcgccagtgcaagaccgagactgagggaaagcatgtctgctgggtgtgaccatgtttcctctcaataaagttcccctgtgacactcaaaaaaaaa

SEQ ID NO: 855 - DNA, 427 bp, Artificial Sequence
  Description of Artificial sequences:primer
  misc_feature (1)..(427): 3' terminal sequence from clone image:347373. transcription elongation factor b (siii), polypeptide 1 (15kda, elongin c)(TCEB1) gene.
tattataatttattttatttaacaatctaagaagttcgcagccatcagcagttccagtgcaatttcaggtgcaattgggaattcaggaatctcggtggagctgttagtgtagcgaaccttgtacgtaaaatacatgcatactttcgatagcacatgtgaaggtatctctctaaaattgacctcattggtttcgttctcagcaaactgacctgggccactcaacatggcttttatcgtgcctgatgttaatgcatgttctctttttacaataaattcatggccatcagatgatatcaatttgacatacatggcatcaggtccttcacagccaccataggttttctcctctccatccattttgttcttatgaaattctactttgcttccccaggaactttagtagtttcctggtgaggcgcctcgtgcc

SEQ ID NO: 856 - DNA, 401 bp, Artificial Sequence
  Description of Artificial sequences:primer
  misc_feature (1)..(401): 5' terminal sequence from clone image:347373. transcription elongation factor b (siii), polypeptide 1 (15kda, elongin c)(TCEB1) gene.
  misc_feature (184)..(184): n is a, c, g, or t
cgcctcaccaggaaactactaaagttcctggggaagcaaagtagaatttcataagaacaaaatggatggagaggagaaaacctatggtggctgtgaaggacctgatgccatgtatgtcaaattgatatcatctgatggccatgaatttattgtaaaaagagaacatgcattaacatcaggcacngataaaagccatgttgagtggcccaggtcagtttgctgagaacgaaaccaatgaggtcaattttagagagataccttcacatgtgctatcgaaagtatgcatgtattttaccgtacaaggttcgctacactaacagctccaccgagattcctgaattcccaattgcacctgaaattgcactggaactgctgatggctgcgaacttcttagattgtta

SEQ ID NO: 857 - DNA, 668 bp, Artificial Sequence
  Description of Artificial sequences:primer
  misc_feature (1)..(668): transcription elongation factor b (siii), polypeptide 1 (15kda, elongin c)(TCEB1) gene.
cggggacccggctgcggtggctgcgggactgacgagaaactactaaagttcctggggaagcaaagtagaatttcataagaacaaaatggatggagaggagaaaacctatggtggctgtgaaggacctgatgccatgtatgtcaaattgatatcatctgatggccatgaatttattgtaaaaagagaacatgcattaacatcaggcacgataaaagccatgttgagtggcccaggtcagtttgctgagaacgaaaccaatgaggtcaattttagagagataccttcacatgtgctatcgaaagtatgcatgtattttacgtacaaggttcgctacactaacagctccaccgagattcctgaattcccaattgcacctgaaattgcactggaactgctgatggctgcgaacttcttagattgttaaataaaataaattataataaactgttaactcttttcagtatttaatacctgtagttcagttagtaactttttcatatatagcatgttgcctgtatgcagttgaactatataaagttcattgcaaagcagattatcttgtttttttgcatagcaatcaaagttgaaatttgtttgctacatcaacaaattaaggacattttcacaaactgagaaataaacaaatatgccaattaaaaaaaaaaaaa

SEQ ID NO: 858 - DNA, 314 bp, Artificial Sequence
  Description of Artificial sequences:primer
  misc_feature (1)..(314): 3' terminal sequence from clone image:34888. reelin(RELN) gene.
  misc_feature (121)..(121): n is a, c, g, or t
  misc_feature (185)..(185): n is a, c, g, or t
  misc_feature (202)..(202): n is a, c, g, or t
  misc_feature (248)..(248): n is a, c, g, or t
  misc_feature (287)..(287): n is a, c, g, or t
  misc_feature (302)..(302): n is a, c, g, or t
  misc_feature (313)..(313): n is a, c, g, or t
ttttttttttgcttttggacataatttttatttaagcatgggcttttatagcttggttcaccctagagtgcaacctttcagttacacaaatagcattcagagctacagggccattataatnttgctggtgttgtacaacttcatcagaaggtatgaatatgacccgcagaaaaaacaatccacgnaaggagaacacaatganaaaacaaccactgttttacaaaatcactctgattatcacaggacanaaaatgggcagttactgttaggtaaatcagccacagtancactttaaaaaaagntctttaggacna

SEQ ID NO: 859 - DNA, 487 bp, Artificial Sequence
  Description of Artificial sequences:primer
  misc_feature (1)..(487): 5' terminal sequence from clone image:34888. reelin(RELN) gene.
  misc_feature (31)..(31): n is a, c, g, or t
  misc_feature (428)..(428): n is a, c, g, or t
  misc_feature (460)..(460): n is a, c, g, or t
  misc_feature (474)..(474): n is a, c, g, or t
  misc_feature (486)..(486): n is a, c, g, or t
tatactaggtaaaatatcattttacaccttnactagcatattgatgattgataatgcagcttatactgctcagaacaaaattaccctttcccccctctcctaccctaactcaagttcatgtcatattgatctttatgttggaatcacatcacatgacattatgtacattttatgtcttcatggaattagggagaaaaggctttgggaccatgaggaaactcagtgaatttgaaatatactgataggctcactctcataaaccacatattgatgccacatatgggatatattgtcactcaggtcagtgtgaggaatatgatcctttcagtgatgttataggctcacaatcctttttaaagggactattacccaaaacatttaacagctgtccactactaggtattgttacagtttcctacagggttccnggaaatccatctttcggtattttttatccggnttcacacacggctntatggtttaatnt

SEQ ID NO: 860 - DNA, 11564 bp, Artificial Sequence
  Description of Artificial sequences:primer
  misc_feature (1)..(11564): reelin(RELN) gene.
tcggcgggggcccgctcccaggcccgctcccgagcccgttccgctcccgtccgccttcttctcgccttctctccgcgtggctcctccgtcccggcgtctccaaaactgaatgagcgagcggcgcgtagggcgcgcggcggcggcggcggcggcggcggcatggagcgcagtggctgggcccggcagactttcctcctagcgctgttgctgggggcgacgctgagggcgcgcgcggcggctggctattacccccgcttttcgcccttctttttcctgtgcacccaccacggggagctggaaggggatggggagcagggcgaggtgctcatttccctgcatattgcgggcaaccccacctactacgttccgggacaagaataccatgtgacaatttcaacaagcaccttttttgacggcttgctggtgacaggactatacacatctacaagtgttcaggcatcacagagcattggaggttccagtgctttcggatttgggatcatgtctgaccaccagtttggtaaccagtttatgtgcagtgtggtagcctctcacgtgagtcacctgcccacaaccaacctcagtttcatctggattgctccacctgcgggcacaggctgtgtgaatttcatggctacagcaacacaccggggccaggttattttcaaagatgctttagcccagcagttgtgtgaacaaggagctccaacagatgtcactgtgcacccacatctagctgaaatacatagtgacagcattatcctgagagatgactttgactcctaccaccaactgcaattaaatccaaatatatgggttgaatgtaacaactgtgagactggagaacagtgtggcgcgattatgcatggcaatgccgtcaccttctgtgaaccatatggcccacgagaactgattaccacaggccttaatacaacaacagcttctgtcctccaattttccattgggtcaggttcatgtcgctttagttattcagaccccagcatcatcgtgttatatgccaagaataactctgcggactggattcagctagagaaaattagagccccttccaatgtcagcacaatcatccatatcctctaccttcctgaggacgccaaaggggagaatgtccaatttcagtggaagcaggaaaatcttcgtgtaggtgaagtgtatgaagcctgctgggccttagataacatcttgatcatcaattcagctcacagacaagtcgttttagaagatagtctcgacccagtggacacaggcaactggcttttcttcccaggagctacagttaagcatagctgtcagtcagatgggaactccatttatttccatggaaatgaaggcagcgagttcaattttgccaccaccagggatgtagatctttccacagaagatattcaagagcaatggtcagaagaatttgagagccagcctacaggatgggatgtcttgggagctgtcattggtacagaatgtggaacgatagaatcaggcttatcaatggtcttcctcaaagatggagagaggaaattatgcactccatccatggacactaccggttatgggaacctgaggttttactttgtgatgggaggaatttgtgaccctggaaattctcatgaaaatgacataatcctgtatgcaaaaattgaaggaagaaaagagcatataacactggataccctttcctattcctcatataaggttccgtctttggtttctgtggtcatcaatcctgaacttcagactcctgctaccaaattttgtctcaggcaaaagaaccatcaaggacataataggaatgtctgggctgtagactttttccatgtcttgcctgttctcccttctacaatgtctcacatgatacagttttccatcaatctgggatgtggaacgcatcagcctggtaacagtgtcagcttggaattttctaccaaccatgggcgctcctggtccctccttcacactgaatgcttacctgagatctgtgctggaccccacctcccccacagcactgtctactcctctgaaaactacagtgggtggaaccgaataacaattccccttcctaacgcagcactaacccggaacaccaggattcgctggagacaaacaggaccaatccttggaaacatgtgggcaattgataatgtttatattggcccgtcatgtctcaaattctgttctggcagaggacagtgcactagacatggttgcaagtgtgaccctggattttctggcccagcttgtgagatggcatcccagacattcccaatgtttatttctgaaagctttggcagttccaggctctcctcttaccataacttttactctatccgtggtgctgaagtcagctttggttgtggtgtcttggccagtggtaaggccctggttttcaacaaagatgggcggcgtcagctaattacatctttccttgacagctcacaatccaggtttctccagttcacactgagactggggagcaaatctgttctgagcacgtgcagagcccctgatcagcctggtgaaggagttttgttgcattattcttatgataatgggataacttggaaactcctggagcattattcatatctcagctatcatgagcccagaataatctccgtagaactaccaggtgatgcaaagcagtttggaattcagttcagatggtggcaaccgtatcattcttcccagagagaagatgtatgggctattgatgagattatcatgacatctgtgcttttcaacagcattagtcttgactttaccaatcttgtggaggtcactcagtctctgggattctaccttggaaatgttcagccatactgtggccacgactggaccctttgttttacaggagattctaaacttgcctcaagtatgcgctatgtggaaacacaatcaatgcagataggagcatcctatatgattcagttcagtttggtgatgggatgtggccagaaatacaccccacacatggacaaccaggtgaagctggagtactcaaccaaccacggccttacctggcacctcgtccaagaagaatgccttccaagtatgccaagttgtcaggaatttacatcagcaagtatttaccatgccagtgagtttacacagtggaggagagtcatagtgcttcttccccagaaaacttggtccagtgctacccgtttccgctggagccagagctattacacagctcaagacgagtgggctttggacagcatttacattgggcagcagtgccccaacatgtgcagtgggcatggctcatgcgatcatggcatatgcaggtgtgaccaggggtaccaaggcactgaatgccacccagaagctgcccttccgtccacaattatgtcagattttgagaaccagaatggctgggagtctgactggcaagaagttattgggggagaaattgtaaaaccagaacaagggtgtggtgtcatctcttctggatcatctctgtacttcagcaaggctgggaaaagacagctggtgagttgggacctggatacttcttgggtggactttgtccagttctacatccagataggcggagagagtgcttcatgcaacaagcctgacagcagagaggagggcgtcctccttcagtacagcaacaatgggggcatccagtggcacctgctagcagagatgtacttttcagacttcagcaaacccagatttgtctatctggagcttccagctgctgccaagaccccttgcaccaggttccgctggtggcagcccgtgttctcaggggaggactatgaccagtgggcagtcgatgacatcatcattctgtccgagaagcagaagcagatcatcccagttatcaatccaactttacctcagaacttttatgagaagccagcttttgattaccctatgaatcagatgagtgtgtggttgatgttggctaatgaaggaatggttaaaaatgaaaccttctgtgctgccacaccatcagcaatgatatttggaaaatcagatggagatcgatttgcagtaactcgagatttgaccctgaaacctggatatgtgctacagttcaagctaaacataggttgtgccaatcaattcagcagtactgctccagttcttcttcagtactctcatgatgctggtatgtcctggtttctggtgaaagaaggctgttacccggcttctgcaggcaaaggatgcgaaggaaactccagagaactaagtgagcccaccatgtatcacacaggggactttgaagaatggacaagaatcaccattgttattccaaggtctcttgcatccagcaagaccagattccgatggatccaggagagcagctcacagaaaaacgtgcctccatttggtttagatggagtgtacatatccgagccttgtcccagttactgcagtggccatggggactgcatttcaggagtgtgtttctgtgacctgggatatactgctgcacaaggaacctgtgtgtcaaatgtccccaatcacaatgagatgttcgataggtttgaggggaagctcagccctctgtggtacaagataacaggtgcccaggttggaactggctgtggaacacttaacgatggcaaatctctctacttcaatggccctgggaaaagggaagcccggacggtccctctggacaccaggaatatcagacttgttcaattttatatacaaattggaagcaaaacttcaggcattacctgcatcaaaccaagaactagaaatgaagggcttattgttcagtattcaaatgacaatgggatactctggcatttgcttcgagagttggacttcatgtccttcctggaaccacagatcatttccattgacctgccacaggacgcgaagacacctgcaacggcatttcgatggtggcaaccgcaacatgggaagcattcagcccagtgggctttggatgatgttcttataggaatgaatgacagctctcaaactggatttcaagacaaatttgatggctctatagatttgcaagccaactggtatcgaatccaaggaggtcaagttgatattgactgtctctctatggatactgctctgatattcactgaaaacataggaaaacctcgttatgctgagacctgggattttcatgtgtcagcatctacctttttgcagtttgaaatgagcatgggctgtagcaagcccttcagcaactcccacagtgtacagctccagtattctctgaacaatggcaaggactggcatcttgtcaccgaagagtgtgttcctccaaccattggctgtctgcattacacggaaagttcaatttacacctcggaaagattccagaattggaagcggatcactgtctaccttccactctccaccatttctcccaggacccggttcagatggattcaggccaactacactgtgggggctgattcctgggcgattgataatgttgtactggcctcagggtgcccttggatgtgctcaggacgagggatttgtgatgctggacgctgtgtgtgtgaccggggctttggtggaccctattgtgttcctgttgttcctctgccctcgattcttaaagacgatttcaatgggaatttacatcctgacctttggcctgaagtgtatggtgcagagagggggaatctgaatggtgaaaccatcaaatctggaacatctctaatttttaaaggggaaggactaaggatgcttatttcaagagatctagattgtacaaatacaatgtatgtccagttttcacttagatttatagcaaaaagtaccccagagagatctcactctattctgttacaattctccatcagtggaggaatcacttggcacctgatggatgaattttactttcctcaaacaacgaatatacttttcatcaatgttcccttgccatacactgcccaaaccaatgctacaagattcagactctggcaaccttataataacggtaagaaagaagaaatctggattgttgatgacttcattatcgatggaaataatgtaaacaaccctgtgatgctcttggatacatttgattttgggcccagagaagacaattggtttttctatcctggtggtaacatcggtctttattgtccatattcttcaaagggggcacctgaagaagattcagctatggtgtttgtttcaaatgaagttggtgagcattccattaccacccgtgacctaaatgtgaatgagaacaccatcatacaatttgagatcaacgttggctgttcgactgatagctcatccgcggatccagtgagactggaattttcaagggacttcggggcgacctggcaccttctgctgcccctctgctaccacagcagcagccacgtcagctctttatgctccaccgagcaccaccccagcagcacctactacgcaggaaccatgcagggctggaggagggaggtcgtgcactttgggaagctgcacctttgtggatctgtccgtttcagatggtaccagggattttaccctgccggctctcagccagtgacatgggccattgataatgtctacatcggtccccagtgtgaggagatgtgtaatggacaggggagctgtatcaatggaaccaaatgtatatgtgaccctggctactcaggtccaacctgtaaaataagcaccaaaaatcctgattttctcaaagatgatttcgaaggtcagctagaatctgatagattcttattaatgagtggtgggaaaccatctcgaaagtgtggaatcctttctagtggaaacaacctctttttcaatgaagatggcttgcgcatgttgatgacacgagacctggatttatcacatgctagatttgtgcagttcttcatgagactgggatgtggtaaaggcgttcctgaccccaggagtcaacccgtgctcctacagtattctctcaacggtggcctctcgtggagtcttcttcaggagttccttttcagcaattccagcaatgtgggcaggtacattgccctggagatacccttgaaagcccgttctggttctactcgccttcgctggtggcaaccgtctgagaatgggcacttctacagcccctgggttatcgatcagattcttattggaggaaatatttctggtaatacggtcttggaagatgatttcacaacccttgatagtaggaaatggctgcttcacccaggaggcaccaagatgcccgtgtgtggctctactggtgatgccctggtcttcattgaaaaggccagcacccgttacgtggtcagcacagacgttgccgtgaatgaggattccttcctacagatagacttcgctgcctcctgctcagtcacagactcttgttatgcgattgaattggaatactcagtagatcttggattgtcatggcacccattggtaagggactgtctgcctaccaatgtggaatgcagtcgctatcatctgcaacggatcctggtgtcagacactttcaacaagtggactagaatcactctgcctctccctccttataccaggtcccaagccactcgtttccgttggcatcaaccagctccttttgacaagcagcagacatgggcaatagataatgtctatatcggggatggctgcatagacatgtgcagtggccatgggagatgcatccagggaaactgcgtctgtgatgaacagtggggtggcctgtactgtgatgaccccgagacctctcttccaacccaactcaaagacaacttcaatcgagctccatccagtcagaactggctgactgtgaacggagggaaattgagtacagtgtgtggagccgtggcgtcgggaatggctctccatttcagtgggggttgtagtcgattattagtcactgtggatctaaacctcactaatgctgagttcatccaattttacttcatgtatgggtgcctgattacaccaaacaaccgtaaccaaggtgttctcttggaatattctgtcaatggaggcattacctggaacctgctcatggagattttctatgaccagtacagtaagcccgggtttgtgaatatccttctccctcctgatgctaaagagattgccactcgcttccgctggtggcagccaagacatgacggcctggatcagaacgactgggccattgacaatgtcctcatctcaggctctgctgaccaaaggaccgttatgctggacaccttcagcagcgccccagtaccccagcatgagcgctcccctgcagatgccggccctgtcgggaggatcgcctttgacatgtttatggaagacaaaacttcagtgaatgagcactggctattccatgatgattgtacagtagaaagattctgtgactcccctgatggtgtgatgctctgtggcagtcatgatggacgggaggtgtatgcagtgacccatgacctgactcccactgaaggctggattatgcaattcaagatctcagttggatgtaaggtgtctgaaaaaattgcccagaatcaaattcatgtgcagtattctactgacttcggtgtgagttggaattatctggtccctcagtgcttgcctgctgacccaaaatgctctggaagtgtttctcagccatctgtattctttccaactaaagggtggaaaaggatcacctacccacttcctgaaagcttagtgggaaatccggtaaggtttaggttctatcagaagtactcagacatgcagtgggcaatcgataatttctacctgggccctggatgcttggacaactgcaggggccatggagattgcttaagggaacagtgcatctgtgatccgggatactcagggccaaactgctacttgacccacactctgaagactttcctgaaggaacgctttgacagtgaagaaatcaaacctgacttatggatgtccttagaaggtggaagtacttgcactgagtgtggaattcttgccgaggacactgcactctattttgggggatccactgtgagacaagcggttacacaagatttggatcttcgaggtgcaaagttcctgcaatactgggggcgcatcggtagtgagaacaacatgacctcttgccatcgtcccatctgccggaaggaaggcgtgctgttggactactctaccgatggaggaattacctggactttgctccatgagatggattaccagaaatacatttctgttagacacgactacatacttcttcctgaagatgccctcaccaacacaactcgacttcgctggtggcagccttttgtgatcagcaatggaattgtggtctctggggtggagcgtgctcagtgggcactggacaacattttgattggtggagcagaaatcaatcccagccaattggtggacacttttgatgatgaaggcacttcccatgaagaaaactggagtttttaccctaatgctgtaaggacagcaggattttgtggcaatccatcctttcacctctattggccaaataaaaagaaggacaagactcacaatgctctctcctcccgagaactcattatacagccaggatacatgatgcagtttaaaattgtggtgggttgtgaagccacttcttgtggtgaccttcattccgtaatgctggaatacactaaggatgcaagatcggattcctggcagctcgtacagacccagtgccttccttcctcttctaacagcattggctgctcccctttccagttccatgaagccaccatctacaactctgtcaacagctcaagctggaaaagaatcaccatccagctgcctgaccatgtctcctctagtgcaacacagttccgctggatccagaagggagaagaaactgagaagcaaagctgggcaattgaccacgtgtacattggagaggcttgccccaagctctgcagcgggcacggatactgcacgaccggtgccatctgcatctgcgacgagagcttccaaggtgatgactgctctgttttcagtcacgaccttcccagttatattaaagataattttgagtccgcaagagtcaccgaggcaaactgggagaccattcaaggtggagtcataggaagtggctgtgggcagctggccccctacgcccatggagactcactgtactttaatggctgtcagatcaggcaagcagctaccaagcctctggatctcactcgagcaagcaaaatcatgtttgttttgcaaattgggagcatgtcgcagacggacagctgcaacagtgacctgagtggcccccacgctgtggacaaggcagtgctgctgcaatacagcgtcaacaacgggatcacctggcatgtcatcgcccagcaccagccaaaggacttcacacaagctcagagagtgtcttacaatgtccccctggaggcacggatgaaaggagtcttactgcgctggtggcaaccacgccacaatggaacaggtcatgatcaatgggctttggaccatgtggaggtcgtcctagtaagcactcgcaaacaaaattacatgatgaatttttcacgacaacatgggctcagacatttctacaacagaagacgaaggtcacttaggcgatacccatgaagaatcaaaaagtttattttttttcttccaacatgtgatgtgttgctctccattcttttaaatctcgcactacatctgatatcaggaaatatctgtgaaggacttggtgattacctgaaagcccttctcaagaccgagtgtacaccactttcccacactgtgaactaatgacaagtgacttatttgctcataagtaaatgtcttcatgttgatgtgtccgtgaaagttgtgatctgttgtaatatcagttacagtggcagtattgacaataagaaacagtttaacagaaaaatgaaatttaagcacaaaaaatttaagagattttatgtttaaaatggcatttagcacagtatttaacattcttggtcacaaagctatttaagtggactgtatttcggctatgtctcatgttttatatgattaaattatcattgtttgtcctttatgtattctcttctacaatacaacacattgaaactgtatttacttgttatgttgtaatattttgctgctgaatttggggctacttatattctgcagaaaattaattgaaatacctattcaagaagatagttgtaaagatattgtatctcctttaatatactccttaaaaatgtatgttggtttagcgttgttttgtggataagaaaaatgcttgaccctgaaatattttctactttaaattgtggatgaagaccctatctcccacaaataagttcccatttccttgtctaaagatctttttttaagtgttctgtggctgatttactaacagtaactgccattttttgtctgtgataacagagtgatttgtaaaacagtggttgttttttcattgtgttttcttcgtggattgttttttctgcgggtcatattcataccttctgatgaagttgtacaacaccagcaacattataatggccctgtagctctgaatgctatttgtgtaactgaaaggttgcactctagggtgaaccaagctataaaagcccatgcttaaataaaaattatgtccaaaagcc

SEQ ID NO: 861 - DNA, 130 bp, Artificial Sequence
  Description of Artificial sequences:primer
  misc_feature (1)..(130): 3' terminal sequence from clone image:34917. s-phase kinase-associated protein 1a (p19a)(SKP1A) gene.
ttttttttgggttaagtgtctttttaattgaaaagctaactgtccagttacatttctcccaaaaaaccacaaactgggtagtaactgagtctctaggcaatatatttaaaactaagaggattaaaaataa

SEQ ID NO: 862 - DNA, 474 bp, Artificial Sequence
  Description of Artificial sequences:primer
  misc_feature (1)..(474): 5' terminal sequence from clone image:34917. s-phase kinase-associated protein 1a (p19a)(SKP1A) gene.
  misc_feature (398)..(398): n is a, c, g, or t
  misc_feature (408)..(408): n is a, c, g, or t
  misc_feature (432)..(432): n is a, c, g, or t
ccttcgctaacgcctcccggctctcgtcagcctcccgccggccgtctccttaacaccgaacaccatgccttcaattaagttgcagagttctgatggagagatatttgaagttgatgtggaaattgccaaacaatctgtgactattaagaccatgttggaagatttgggaatggatgatgaaggagatgatgacccagttcctctaccaaatgtgaatgcagcaatattaaaaaaggtcattcagtggtgcacccaccacaaggatgaccctcctcctcctgaagatgatgagaacaaagaaaagcgaacagatgatatccctgtttgggaccaagtattcctgaaaagttgaccaagggaacactttttggaactcatttctgggctggcaaacttanttaggacatncaaaggtttgctttgatgtttacntgcaaggactgttggcccatatggttcaaggggggaaatttt

SEQ ID NO: 863 - DNA, 2172 bp, Artificial Sequence
  Description of Artificial sequences:primer
  misc_feature (1)..(2172): s-phase kinase-associated protein 1a (p19a)(SKP1A) gene.
ctgcgccctctcctataaagcagacgccgcgccgcgctgcgacgctgtagtggcttcgtcttcggtttttctcttccttcgctaacgcctcccggctctcgtcagcctcccgccggccgtctccttaacaccgaacaccatgccttcaattaagttgcagagttctgatggagagatatttgaagttgatgtggaaattgccaaacaatctgtgactattaagaccatgttggaagatttgggaatggatgatgaaggagatgatgacccagttcctctaccaaatgtgaatgcagcaatattaaaaaaggtcattcagtggtgcacccaccacaaggatgaccctcctcctcctgaagatgatgagaacaaagaaaagcgaacagatgatatccctgtttgggaccaagaattcctgaaagttgaccaaggaacactttttgaactcattctggctgcaaactacttagacatcaaaggtttgcttgatgttacatgcaagactgttgccaatatgatcaaggggaaaactcctgaggagattcgcaagaccttcaatatcaaaaatgactttactgaagaggaggaagcccaggtaggtagcacacagttttgtctttgatcacatgctcttaaaaagggagtaacacctataacatgccagcaaaagaggtgactgtatcaagtagtcttgatactttagggataatatgtacttaatgtgtcttaaacatactcttactgttctgtctttatgaatctgaacacttagatgatactgcattttaagcataagaacaattagttttcaatgagaagagctcttgttaatgtattaacagttactagttttggcacctgcaactttctgtatagaccatacatatctgacatcagaaaagcaggccctagagagaagtatatactagggtactttagagcaacttaatgaggggaggaaatgaaagaatagatcagaatgattttgttgacatgactacagactgaaataatgtgaatgaattaactgaatttgctctgtcaactttagtaaattgcccattgcctttgctttgttcataatttcagcagggcagaataaaaaccatgggaggcaaagaaaggaaatccggaaatatagtcttaacctggtgttgttctaattttccatctgttcttctgactcaactcactggctatcgatgaatcagtaggtagtatttataagtcttaggaaagactactcaagttaaggtacttccctatatccatctcttttaggtacgcaaagagaaccagtggtgtgaagagaagtgaaatgttgtgcctgacactgtaacactgtaaggattgttccaaatactagttgcactgctctgtttataattgttaatattagacaaacagtagacaaatgcagcagcaagtcaattgtattagcagaatattgtcctcattgcatgtgtagtttgagcacagatcccaaaccttacggccaagtttcttctagtatgatggaaagtttcttttttctttgctctgaataaaactgaactgtgggttctctataagtggcattttgggctttccctcttttttgtaaagcaatgtctgcctagtttattgtccagttaactttagtgaccttttaaaagttggcattgtaaataaaacaacttgcaaaaaagttttctggaatagaattaacaaaatattatctttattcatgagttggaaactggaaaaaggcttcttgaagtaaatgttctgagtggagctactaggatgtcttccagcctcctgcagtcaaggagtaccactgtattgattagcctgtatgtagcagggctcccttcattgcatctgaggacttgttttctttttctttatttttaatcctcttagttttaaatatattgcctagagactcagttactacccagtttgtggttttttgggagaaatgtaactggacagttagcttttcaattaaaaagacacttaacccatgtgggatgtcatctttttataattagtgttcccatgtggagaaaattattcacactacttgcatgtaaagaataatttaacttttaacattaaaatatgtggtaaaacccagaaagcatccatcatgaatgcaagatactttcaataaaaagtaagttatat

SEQ ID NO: 864 - DNA, 474 bp, Artificial Sequence
  Description of Artificial sequences:primer
  misc_feature (1)..(474): 3' terminal sequence from clone image:35072. aquaporin 1 (channel-forming integral protein, 28kda)(AQP1) gene.
  misc_feature (139)..(139): n is a, c, g, or t
  misc_feature (375)..(375): n is a, c, g, or t
  misc_feature (431)..(431): n is a, c, g, or t
  misc_feature (436)..(436): n is a, c, g, or t
  misc_feature (442)..(442): n is a, c, g, or t
ttttttttgaccttacaagtcattttcctttattttcttaacatataatgaaattccaactccaaagagacatatatgcagagcagacagatgcagggccttggtgtgcagcagcctagaaccaggcagggggtgggtntgacccctctcccctccatcacaactctccccactcctgggcccctggcatttgcccagggcaggaaactgaggaagctgggaaatgagaggaatcagcctcgtgggtccaggggagtagccagagacagggccttggttactaggcctgggccaaatcattgtctagctgaaaccgtggggccttcagtttctttatctgtttaaatgagctaggaagttcctgctaggggattnggagaagagagttttgcagattttgatgcactggtgatagtttaaggggctttttnggttnttcccntttggttttttaaattacctgccgtaatttgt

SEQ ID NO: 865 - DNA, 406 bp, Artificial Sequence
  Description of Artificial sequences:primer
  misc_feature (1)..(406): 5' terminal sequence from clone image:35072. aquaporin 1 (channel-forming integral protein, 28kda)(AQP1) gene.
  misc_feature (217)..(217): n is a, c, g, or t
  misc_feature (342)..(342): n is a, c, g, or t
  misc_feature (365)..(365): n is a, c, g, or t
  misc_feature (370)..(370): n is a, c, g, or t
  misc_feature (376)..(376): n is a, c, g, or t
cctggcctcagagcttcctggggaccaagatttaccaattcacccactcccttgaagttgtggaggaggtgaaagaaagggacccacctgctagtcgcccctcagagcatgatgggaggtgtgccagaaagtcccccctcgccccaaagttgctcaccgactcacctgcgcaagtgcctggggattctaccgtaattgctttgtgcctttgggcagngcccttccttcttttcctaacatgcaccttgctcccaatggtgcttgggagggggaagagatcccgggaggtgcagtgggagggggcaagctttgttccttcagttctgcttgctcccaagcccntgacccgttcgggattaattgcntgacntgggantcgttcctattattcaggggcttcagttga

SEQ ID NO: 866 - DNA, 1662 bp, Artificial Sequence
  Description of Artificial sequences:primer
  misc_feature (1)..(1662): aquaporin 1 (channel-forming integral protein, 28kda)(AQP1) gene.
gcacccggcagcggtctcaggccaagccccctgccagcatggccagcgagttcaagaagaagctcttctggagggcagtggtggccgagttcctggccacgaccctctttgtcttcatcagcatcggttctgccctgggcttcaaatacccggtggggaacaaccagacggcggtccaggacaacgtgaaggtgtcgctggccttcgggctgagcatcgccacgctggcgcagagtgtgggccacatcagcggcgcccacctcaacccggctgtcacactggggctgctgctcagctgccagatcagcatcttccgtgccctcatgtacatcatcgcccagtgcgtgggggccatcgtcgccaccgccatcctctcaggcatcacctcctccctgactgggaactcgcttggccgcaatgacctggctgatggtgtgaactcgggccagggcctgggcatcgagatcatcgggaccctccagctggtgctatgcgtgctggctactaccgaccggaggcgccgtgaccttggtggctcagccccccttgccatcggcctctctgtagcccttggacacctcctggctattgactacactggctgtgggattaaccctgctcggtcctttggctccgcggtgatcacacacaacttcagcaaccactggattttctgggtggggccattcatcgggggagccctggctgtactcatctacgacttcatcctggccccacgcagcagtgacctcacagaccgcgtgaaggtgtggaccagcggccaggtggaggagtatgacctggatgccgacgacatcaactccagggtggagatgaagcccaaatagaaggggtctggcccgggcatccacgtagggggcaggggcaggggcgggcggagggaggggaggggtgaaatccatactgtagacactctgacaagctggccaaagtcacttccccaagatctgccagacctgcatggtcaagcctcttatgggggtgtttctatctctttctttctctttctgtttcctggcctcagagcttcctggggaccaagatttaccaattcacccactcccttgaagttgtggaggaggtgaaagaaagggacccacctgctagtcgcccctcagagcatgatgggaggtgtgccagaaagtcccccctcgccccaaagttgctcaccgactcacctgcgcaagtgcctgggattctaccgtaattgctttgtgcctttgggcaggccctccttcttttcctaacatgcaccttgctcccaatggtgcttggagggggaagagatcccaggaggtgcagtggagggggcaagctttgctccttcagttctgcttgctcccaagcccctgacccgctcggacttactgcctgaccttggaatcgtccctatatcagggcctgagtgacctccttctgcaaagtggcagggaccggcagagctctacaggcctgcagcccctaagtgcaaacacagcatgggtccagaagacgtggtctagaccagggctgctctttccacttgccctgtgttctttccccaggggcatgactgtcgccacacgcctctgcatatatgtctctttggagttggaatttcattatatgttaagaaaataaaggaaaatgacttgtaaggtc

SEQ ID NO: 867 - DNA, 244 bp, Artificial Sequence
  Description of Artificial sequences:primer
  misc_feature (1)..(244): 3' terminal sequence from clone image:35262. interferon regulatory factor 2(IRF2) gene.
  misc_feature (185)..(185): n is a, c, g, or t
  misc_feature (211)..(211): n is a, c, g, or t
  misc_feature (222)..(222): n is a, c, g, or t
ttttttttaactatatatcatattcatttattatcaatccacaggaaaatctgattgctacatgagctcataaaagcttttttcacctttacaaaattaaaaaaaaaaatgtgccacaaggatgtaataacaactgctgataaacaagaaaaggaatcttaaaattataaatttgctgtagaaangataaaaaacaattatattttatttnggattttaccntgaataaaatattcccctgtat

SEQ ID NO: 868 - DNA, 455 bp, Artificial Sequence
  Description of Artificial sequences:primer
  misc_feature (1)..(455): 5' terminal sequence from clone image:35262. interferon regulatory factor 2(IRF2) gene.
  misc_feature (381)..(381): n is a, c, g, or t
  misc_feature (409)..(409): n is a, c, g, or t
  misc_feature (427)..(427): n is a, c, g, or t
  misc_feature (436)..(436): n is a, c, g, or t
aagaaaccaaagacagaaaaagaagacaaagttaagcacatcaagcaagaaccagttgagtcatctctggggcttagtaatggagtaagtgatctttctcctgagtatgcggtcctgacttcaactataaaaaatgaagtggatagtacggtgaacatcatagttgtaggacagtcccatctggacagcaacattgagaatcaagagattgtcaccaatccgccagacatttgccaagttgtagaggtgaccactgagagcgacgagcagccggtcagcatgagcgagctctaccctctgcagatctcccccgtgtcttcctatgcagaaagcgaaacgactgatagtgtgcccagcgatgaagagagtgccgagggacgnccacactagcggaagaggaatatttganggcaaacagttacctccngcaatcatngggattcgaggcttctacc

SEQ ID NO: 869 - DNA, 2223 bp, Artificial Sequence
  Description of Artificial sequences:primer
  misc_feature (1)..(2223): interferon regulatory factor 2(IRF2) gene.
tctccttgttttgctttcgatctggactgttctcaggcaagccggggagtaacttttagttttgctcctgcgattattcaactgacgggctttcatttccatttcacacaccctagcaacacttataccttgcggaattgtattggtagcgtgaaaaaagcacactgagagggcaccatgccggtggaaaggatgcgcatgcgcccgtggctggaggagcagataaactccaacacgatcccggggctcaagtggcttaacaaggaaaagaagatttttcagatcccctggatgcatgcggctagacatgggtgggatgtggaaaaagatgcaccactctttagaaaccgggcaatccatacaggaaagcatcaaccaggagtagataaacctgatcccaaaacatggaaggcgaatttcagatgcgccatgaattccttgcctgatattgaagaagtcaaggataaaagcataaagaaaggaaataatgccttcagggtctaccgaatgctgcccctatcagaacggccttctaagaaaggaaagaaaccaaagacagaaaaagaagacaaagttaagcacatcaagcaagaaccagttgagtcatctctggggcttagtaatggagtaagtgatctttctcctgagtatgcggtcctgacttcaactataaaaaatgaagtggatagtacggtgaacatcatagttgtaggacagtcccatctggacagcaacattgagaatcaagagattgtcaccaatccgccagacatttgccaagttgtagaggtgaccactgagagcgacgagcagccggtcagcatgagcgagctctaccctctgcagatctcccccgtgtcttcctatgcagaaagcgaaacgactgatagtgtgcccagcgatgaagagagtgccgaggggcggccacactggcggaagaggaatattgaaggcaaacagtacctcagcaacatggggactcgaggctcctacctgctgcccggcatggcgtccttcgtcacttccaacaaaccggacctccaggtcaccatcaaagaggagagcaatccggtgccttacaacagctcctggcccccttttcaagacctccccctttcttcctccatgaccccagcatccagcagcagtcggccagaccgggagacccgggccagcgtcatcaagaaaacatcggatatcacccaggcccgcgtcaagagctgttaagcctctgactctccgcggtggttgttggggcttcttggctttgttttgttgtttgtttgtattttatttttttctctctgacacctattttagacaaatctaagggaaaaagccttgacaatagaacattgattgctgtgtccaactccagtacctggagcttctctttaactcaggactccagcccattggtagacgtgtgtttctagagcctgctggatctcccagggctactcactcaagttcaaggaccaacaagggcagtggaggtgctgcattgcctgcggtcaaggccagcaaggtggagtggatgcctcagaacggacgagataatgtgaactagctggaattttttattcttgtgaatatgtacataggcagcactagcgacattgcagtctgcttctgcaccttatcttaaagcacttacagataggccttcttgtgatcttgctctatctcacagcacactcagcacccccttctctgcccattccccagcctctcttcctatcccatcccatcccatcccatcccatcccatcccatcccgctcttttcctacttttccttccctcaaagcttccattccacatccggaggagaagaaggaaatgaatttctctacagatgtcccattttcagactgctttaaaaaaaatccttctaatctgctatgcttgaatgccacgcggtacaaaggaaaaagtatcatggaaatattatgcaaattcccagatttgaagacaaaaatactctaattctaaccagagcaagcttttttattttttatacaggggaatattttattcaaggtaaaattctaaataaaatataattgttttttatcttttctacagcaaatttataattttaagattccttttcttgtttatcagcagttgttattacatccttgtggcacatttttttttaattttgtaaaggtgaaaaaagcttttatgagctcatctagcaatcagattttcctgtgga

SEQ ID NO: 870 - DNA, 352 bp, Artificial Sequence
  Description of Artificial sequences:primer
  misc_feature (1)..(352): 3' terminal sequence from clone image:35483. neuroglobin(NGB) gene.
  misc_feature (56)..(56): n is a, c, g, or t
  misc_feature (99)..(99): n is a, c, g, or t
  misc_feature (119)..(119): n is a, c, g, or t
  misc_feature (177)..(177): n is a, c, g, or t
  misc_feature (179)..(179): n is a, c, g, or t
  misc_feature (263)..(263): n is a, c, g, or t
  misc_feature (266)..(266): n is a, c, g, or t
  misc_feature (290)..(290): n is a, c, g, or t
  misc_feature (293)..(293): n is a, c, g, or t
  misc_feature (322)..(322): n is a, c, g, or t
  misc_feature (324)..(324): n is a, c, g, or t
tttttttttttttttttttttttttttttttttttttttgtgaaaaaccaaacctnaaaaagccactttaattccggcctaacagcgccaggggcaatntctggggacagactctgggnacaatgctgtgtggcgaccactcactcacacacggctccaagaaggcccccaaggggnanttaccttcagggggactgagccaagggggaaaggggtggccccagaacaggggaaggggcaggcatggggggaaaaggtgctanttnttggcaaaggagatcttcatggcnttnttctgcgtaatcttaaagccctgcagggntncgcgagctgcccctgcctgtacctcatt

SEQ ID NO: 871 - DNA, 335 bp, Artificial Sequence
  Description of Artificial sequences:primer
  misc_feature (1)..(335): 5' terminal sequence from clone image:35483. neuroglobin(NGB) gene.
  misc_feature (41)..(41): n is a, c, g, or t
  misc_feature (94)..(95): n is a, c, g, or t
  misc_feature (262)..(262): n is a, c, g, or t
  misc_feature (297)..(297): n is a, c, g, or t
  misc_feature (314)..(314): n is a, c, g, or t
tactgaggaaacttgctgctcgaggccaggctgcctagganctgtcccttttttctatactggctcccacatccgggttttttctccgggacgnnccttcggatgcttgggccaatgggaatcgccatttagggtgctccgcccaccgggttcgcgtagagcatcctggaagtcgtagtaaatctctcgagagttctctccgcacgcggctgggagaagcgggtcctacgcacgctttgtttgtcgcgctttgccttccgtncctttccccctacttcccgcctttacctggatttnctttttcggagggaagntccttggagcagccgacgttt

SEQ ID NO: 872 - DNA, 1909 bp, Artificial Sequence
  Description of Artificial sequences:primer
  misc_feature (1)..(1909): neuroglobin(NGB) gene.
ttcccaggccaccatagcggctggcggagggagcgcgcgccttgctggcctggagggggcgggggccgtggcggctttaaagcgcccagcccaggcgtcgcggggtggggcggctctggcggctgcggggcgcagggcgcagcggccaagcggggtccccggaagcacagctggggtgtctccacctacgactggccgcgcgccttttctctcccgcgccagggaaggagcggctgcggcccccgccgggcggaggcacggggggcgtacgaggggcggaggggaccgcgtcgcggaggagatggcgcggcacgtgcggtgacggcacccgagccctgagggtcccagccccgcgctccgcgtccccgggacagcatggagcgcccggagcccgagctgatccggcagagctggcgggcagtgagccgcagcccgctggagcacggcaccgtcctgtttgccaggctgtttgccctggagcctgacctgctgcccctcttccagtacaactgccgccagttctccagcccagaggactgtctctcctcgcctgagttcctggaccacatcaggaaggtgatgctcgtgattgatgctgcagtgaccaatgtggaagacctgtcctcactggaggagtaccttgccagcctgggcaggaagcaccgggcagtgggtgtgaagctcagctccttctcgacagtgggtgagtctctgctctacatgctggagaagtgtctgggccctgccttcacaccagccacacgggctgcctggagccaactctacggggccgtagtgcaggccatgagtcgaggctgggatggcgagtaagaggcgaccccgcccggcagcccccatccatctgtgtctgtctgttggcctgtatctgttgtagcccaggctccccaagcttccctgcatcttggtccttgtccccttggccacactggagaggtgatggggcagggctgggtctcagtatcctagagtccagctgcagaaggagtggcttttcctccaggaaggggcttctgggtgtcccctcatccccagtagcctctttcttgcgtttctttttaccttttttggcactccctctgaccccgcgatgagtgttttggtggcagaggtgggatgagctggaaaggtatggaggtgggagaggatggggctcttctgtctgtcctgcttcttcaggtgagtgcaggccaaggcgggggtgagatggctgagcttccagcgccttctgtcctgcctgcccagtcccttcactgctttcctgccccaagatggcttgcttttcacaaataaagagaaagagcagctttagccttcttggtggaatcccaggcagtgggagcagaatcagaactgccagggaagggaagggggacctgggtctcaatgggtctcatttgagtctcgcgggctgtgcagatgccctgacagagtcggtttcctttggcggcattccctttccctcattcagcacttctgctgggaactccctgactattccgctgctgcaggaacccagctagctggccaggtggggaggggctggggaccggccaggaaggaggggtgacttcatcccagagagacccgagttcccccagcccttcatcaccaacccgctcccgcaggagagagtcttacctcccctggccctcctttctggctcagcctgcagcgactgtgaggccacagctcctcagattcactgcccgctgtgtgccagtactcaggcagctggagagaagagaaggcagcagcagaggcccccgccctcaccccagccatctgcacttgtaccatttgctctgtgctgactgtggtcctataaattcatgagaaataaactggttctgtgtgcctctctaaaaaataaaaaaaaaaaaaaaaaaaa

SEQ ID NO: 873 - DNA, 724 bp, Artificial Sequence
  Description of Artificial sequences:primer
  misc_feature (1)..(724): 3' terminal sequence from clone image:356783. transmembrane 4 superfamily member 5(TM4SF5) gene.
  misc_feature (584)..(584): n is a, c, g, or t
  misc_feature (607)..(607): n is a, c, g, or t
  misc_feature (615)..(615): n is a, c, g, or t
  misc_feature (632)..(632): n is a, c, g, or t
  misc_feature (642)..(642): n is a, c, g, or t
  misc_feature (661)..(661): n is a, c, g, or t
  misc_feature (674)..(674): n is a, c, g, or t
  misc_feature (688)..(688): n is a, c, g, or t
  misc_feature (701)..(701): n is a, c, g, or t
  misc_feature (706)..(706): n is a, c, g, or t
  misc_feature (715)..(715): n is a, c, g, or t
aagagagcgcaaagcagtttattctagcgagcaagggagtgagcgtccaggaaggagcaggtgtaacccggcggtcagtggagcctcagtgaggtgtgtcctgttttttcctgcaatcgccgcagaagacaccaatggtcgcgttcaccagctggatcccacacagtactatctccaggcaggaggcggccaccagcagcgagaagagcgtcacattccaggggaccacgcgagggggcgcctcgcaccgatcccatagagtgcggttgagcaagtaagctcccgcggtgtcttcgaagtggtagccccactcgccgttcattaagcatctgggtccatttcggagcccagctccagacaccgagaggcagtagatggcaccaagcaccccgaacgccgaggagaagaccgagcgcacatcctgcagcggtttccacagcacccagcaccacagcagcccttgccccctgcccgaacggctgcaatcctggacacagtaccattaggccccgccaatgaagccgccatgagccaacttgcaagttgaaatggttgtgttgtccaggaagtttcccattggtacnacaagaaggcgttgccacaattnaagacgangccaaggttttggggangccccaaaangggaattttccctcggcgnattttgctttagnaattcctaaggggngttaatcgaaaangcaancgttcgggnattttcgcc

SEQ ID NO: 874 - DNA, 427 bp, Artificial Sequence
  Description of Artificial sequences:primer
  misc_feature (1)..(427): 5' terminal sequence from clone image:356783. transmembrane 4 superfamily member 5(TM4SF5) gene.
ggaaaatgtgcccgctgtgtggggctctccctcattaccctctgcctcgtctgcattgtggccaacgccctcctgctggtacctaatggggagacctcctggaccaacaccaaccatctcagcttgcaagtctggctcatgggcggcttcattggcgggggcctaatggtactgtgtccagggattgcagccgttcgggcagggggcaagggctgctgtggtgctgggtgctgtggaaaccgctgcaggatgctgcgctcggtcttctcctcggcgttcggggtgcttggtgccatctactgcctctcggtgtctggagctgggctcgaaatggacccagatgcttaatgaacggcgagtgggctaccacttcgaagacaccgcgggacttacttgctcaaccgcactctatgggatcggtgcgagg

SEQ ID NO: 875 - DNA, 708 bp, Artificial Sequence
  Description of Artificial sequences:primer
  misc_feature (1)..(708): transmembrane 4 superfamily member 5(TM4SF5) gene.
actcaccgcctgtccttcctgacacctcaccatgtgtacgggaaaatgtgcccgctgtgtggggctctccctcattaccctctgcctcgtctgcattgtggccaacgccctcctgctggtacctaatggggagacctcctggaccaacaccaaccatctcagcttgcaagtctggctcatgggcggcttcattggcgggggcctaatggtactgtgtccggggattgcagccgttcgggcagggggcaagggctgctgtggtgctgggtgctgtggaaaccgctgcaggatgctgcgctcggtcttctcctcggcgttcggggtgcttggtgccatctactgcctctcggtgtctggagctgggctccgaaatggacccagatgcttaatgaacggcgagtggggctaccacttcgaagacaccgcgggagcttacttgctcaaccgcactctatgggatcggtgcgaggcgccccctcgcgtggtcccctggaatgtgacgctcttctcgctgctggtggccgcctcctgcctggagatagtactgtgtgggatccagctggtgaacgcgaccattggtgtcttctgcggcgattgcaggaaaaaacaggacacacctcactgaggctccactgaccgccgggttacacctgctccttcctggacgctcactcccttgctcgctagaataaactgctttgcgctctc

SEQ ID NO: 876 - DNA, 435 bp, Artificial Sequence
  Description of Artificial sequences:primer
  misc_feature (1)..(435): 3' terminal sequence from clone image:356980. transforming growth factor, beta 3(TGFB3) gene.
  misc_feature (396)..(396): n is a, c, g, or t
  misc_feature (429)..(429): n is a, c, g, or t
tttttttttttttttttttagaataaggcttttactgttctagaaacaatattccagaagatgaaatcatccaggatgccccaaaaatatttatttatacaaagattttgagagtaatattcatacttgtctttatacctcagtctatgcgtctggggccaagtcactgtgtggcacatgtgcagcttccccgaatgcctcacatgttgtagcacctgcttccaggaacaccaaatgaacacagggtcttggaggggaagtgggggaagaacccataatgccccaaggctgcatggaaccacaatccagaaatgtgcatcctgacctggaaaggccgtctaaccaagtgtccaaggggaaatatgattcgaggggagaagttaaaggagggacccngaaggcagacagggagaaggggttgaatttccncccctt

SEQ ID NO: 877 - DNA, 471 bp, Artificial Sequence
  Description of Artificial sequences:primer
  misc_feature (1)..(471): 5' terminal sequence from clone image:356980. transforming growth factor, beta 3(TGFB3) gene.
  misc_feature (134)..(134): n is a, c, g, or t
  misc_feature (258)..(258): n is a, c, g, or t
  misc_feature (442)..(442): n is a, c, g, or t
  misc_feature (445)..(445): n is a, c, g, or t
  misc_feature (469)..(469): n is a, c, g, or t
ctgtcctctacatcaattaacatcgtgggtcactacagggagaaaatccaggtcatgcagttcctggcccatcaactgtattgggccttttggatatgctgaacgcagaagaaagggtggaaatcaaccctctnctgtctgccctctgggtccctcctctcacctctccctcgatcatatttccccttggacacttggttagacgccttccaggtcaggatgcacatttctggattgtggttccatgcagccttgggnattatgggttcttcccccacttcccctccaagaccctgtgttcatttggtgttcctggaagcaaggtgctacaacatgtgaaggcattcgggggaagctgcacatgtgccacacagtgactttggccccagacggcatagactgaggtataaagacaagtatgaatattactctcaaaatcttnggnataaataaatatttttgggggcancc

SEQ ID NO: 878 - DNA, 2574 bp, Artificial Sequence
  Description of Artificial sequences:primer
  misc_feature (1)..(2574): transforming growth factor, beta 3(TGFB3) gene.
cctgtttagacacatggacaacaatcccagcgctacaaggcacacagtccgcttcttcgtcctcagggttgccagcgcttcctggaagtcctgaagctctcgcagtgcagtgagttcatgcaccttcttgccaagcctcagtctttgggatctggggaggccgcctggttttcctccctccttctgcacgtctgctggggtctcttcctctccaggccttgccgtccccctggcctctcttcccagctcacacatgaagatgcacttgcaaagggctctggtggtcctggccctgctgaactttgccacggtcagcctctctctgtccacttgcaccaccttggacttcggccacatcaagaagaagagggtggaagccattaggggacagatcttgagcaagctcaggctcaccagcccccctgagccaacggtgatgacccacgtcccctatcaggtcctggccctttacaacagcacccgggagctgctggaggagatgcatggggagagggaggaaggctgcacccaggaaaacaccgagtcggaatactatgccaaagaaatccataaattcgacatgatccaggggctggcggagcacaacgaactggctgtctgccctaaaggaattacctccaaggttttccgcttcaatgtgtcctcagtggagaaaaatagaaccaacctattccgagcagaattccgggtcttgcgggtgcccaaccccagctctaagcggaatgagcagaggatcgagctcttccagatccttcggccagatgagcacattgccaaacagcgctatatcggtggcaagaatctgcccacacggggcactgccgagtggctgtcctttgatgtcactgacactgtgcgtgagtggctgttgagaagagagtccaacttaggtctagaaatcagcattcactgtccatgtcacacctttcagcccaatggagatatcctggaaaacattcacgaggtgatggaaatcaaattcaaaggcgtggacaatgaggatgaccatggccgtggagatctggggcgcctcaagaagcagaaggatcaccacaaccctcatctaatcctcatgatgattcccccacaccggctcgacaacccgggccaggggggtcagaggaagaagcgggctttggacaccaattactgcttccgcaacttggaggagaactgctgtgtgcgccccctctacattgacttccgacaggatctgggctggaagtgggtccatgaacctaagggctactatgccaacttctgctcaggcccttgcccatacctccgcagtgcagacacaacccacagcacggtgctgggactgtacaacactctgaaccctgaagcatctgcctcgccttgctgcgtgccccaggacctggagcccctgaccatcctgtactatgttgggaggacccccaaagtggagcagctctccaacatggtggtgaagtcttgtaaatgtagctgagaccccacgtgcgacagagagaggggagagagaaccaccactgcctgactgcccgctcctcgggaaacacacaagcaacaaacctcactgagaggcctggagcccacaaccttcggctccgggcaaatggctgagatggaggtttccttttggaacatttctttcttgctggctctgagaatcacggtggtaaagaaagtgtgggtttggttagaggaaggctgaactcttcagaacacacagactttctgtgacgcagacagaggggatggggatagaggaaagggatggtaagttgagatgttgtgtggcaatgggatttgggctaccctaaagggagaaggaagggcagagaatggctgggtcagggccagactggaagacacttcagatctgaggttggatttgctcattgctgtaccacatctgctctagggaatctggattatgttatacaaggcaagcatttttttttttaaagacaggttacgaagacaaagtcccagaattgtatctcatactgtctgggattaagggcaaatctattacttttgcaaactgtcctctacatcaattaacatcgtgggtcactacagggagaaaatccaggtcatgcagttcctggcccatcaactgtattgggccttttggatatgctgaacgcagaagaaagggtggaaatcaaccctctcctgtctgccctctgggtccctcctctcacctctccctcgatcatatttccccttggacacttggttagacgccttccaggtcaggatgcacatttctggattgtggttccatgcagccttggggcattatgggtcttcccccacttcccctccaagaccctgtgttcatttggtgttcctggaagcaggtgctacaacatgtgaggcattcggggaagctgcacatgtgccacacagtgacttggccccagacgcatagactgaggtataaagacaagtatgaatattactctcaaaatctttgtataaataaatatttttggggcatcctggatgatttcatcttctggaatattgtttctagaacagtaaaagccttattctaaggtg

SEQ ID NO: 879 - DNA, 512 bp, Artificial Sequence
  Description of Artificial sequences:primer
  misc_feature (1)..(512): 3' terminal sequence from clone image:357239. replication protein a3, 14kda(RPA3) gene.
  misc_feature (426)..(426): n is a, c, g, or t
  misc_feature (453)..(453): n is a, c, g, or t
  misc_feature (470)..(470): n is a, c, g, or t
  misc_feature (494)..(494): n is a, c, g, or t
  misc_feature (496)..(496): n is a, c, g, or t
  misc_feature (499)..(499): n is a, c, g, or t
  misc_feature (504)..(504): n is a, c, g, or t
ttttttttctcggacaactgctttattcttgcatctaatctgaccatatattggagtagcaattctttataaaaggacttcggtgagaactgtcaatatatcagttccatcaaaaactctaggttggaatatcttaaaaacagcaaattaaatatgagaaagcacagaaatctctccctcaaacaagaagggcttcctttaatagactttaatatagctcatttacaatcgtatgaaaatccatcaagatcaatcatgttgcacaatccctaaaggataaaactgagggaagtcatggataattttcacagcttcattgtaaagtccaagatcaaaaggatggctatcttctttaaactggacataagatgtacacaagatggtggccttggcggttactcttccaaccacttccacaattccagnggtttcttcatcaaggggttccatcanctcgatggttccatttnaaccttctccctccggaaggaatnanccnttttnccggtggg

SEQ ID NO: 880 - DNA, 272 bp, Artificial Sequence
  Description of Artificial sequences:primer
  misc_feature (1)..(272): 5' terminal sequence from clone image:357239. replication protein a3, 14kda(RPA3) gene.
  misc_feature (238)..(238): n is a, c, g, or t
  misc_feature (261)..(261): n is a, c, g, or t
  misc_feature (265)..(265): n is a, c, g, or t
  misc_feature (270)..(270): n is a, c, g, or t
gaccataatcatggtggacatgatggacttgcccaggtcgcgcatcaacgccggcatgctagctcaattcatcgacaagcctgtctgcttcgtagggaggctggaaaagattcatcccaccaggaaaaatgtttattctttcagatggagaaggaaaaaatggaaccatcgagttgatggaaccccttgatgaagaaatctctggaattgtggaagtggttggaagagtaaccaccanggccaccatctggtgtacatctnatgnccagntt

SEQ ID NO: 881 - DNA, 1622 bp, Artificial Sequence
  Description of Artificial sequences:primer
  misc_feature (1)..(1622): replication protein a3, 14kda(RPA3) gene.
ggcacgaggaagctactcagataagaggctccaagaggacatttttggatgtgaaaaacaatgagaaggaggacaacacacatttacaatcgtcttaattttgtactcagaaaaaggatgtgaagacaatgcacagggaatacaatagtttcagatctgtgtacagtttccttttgcttcatctcctgcaacaatgtaatgaagacaccatgatatcattaacatttcacacaaaaggaaaatgaggctgaaatggtgtgggcaaggcccaggaatctggagcatccctaaccaagcagcagagcacctgggatagagaaagtgctcaagaatgttcacttactgattactacaatcaaaaaaagatacgacactaatttaccacattcttcttacttattttatgagatactattcttccaaggtggagaaagtggagaaagtagagtgacgcagctaagggagtaaatcgaccctcagccaacaagtggcaaaagcctgaagaaagtgatcaagatcactgatgaccccgcggcccatctccaagggggcgggtatcacaaccccgacgccacaccacgtatcattccgcaaaactcccgcgcctcccacgcagaactggcaagagggaaggcgagacagcagtgaacagctggtacgcagcacccacagcaccgcggcagcagctagtgccgactcccgcctagctcttttgactctgttcgcgggaagaatggggaaacagtaaggttgcggcgcctcccgcgagacgaggtacctgaggctggccccgcagtcccccgccgcaccagcaccggagcttcacaccccacttccggggtcaagtcaccgccgggaatcctgtgatcgcagaaaggtagtctcaggttccgcccctatccaagtcccgcctccactgcctctcgccctgtatctgtcaacttccgggacgccgcgcgtcactaagcagccaatctccacttccggactcatccagccccttctccacccctttcagagacagcgcgattgcgatttaggtttccgcgcatttaattggcgaagctggagcgctagtcttcgctgattggtgccgagaaatctgccccatagacacccgcggggcgcacagtttcagtcgtccgtgggtttcccgccagccgcagtcttggaccataatcatggtggacatgatggacttgcccaggtcgcgcatcaacgccggcatgctagctcaattcatcgacaagcctgtctgcttcgtagggaggctggaaaagattcatcccaccggaaaaatgtttattctttcagatggagaaggaaaaaatggaaccatcgagttgatggaaccccttgatgaagaaatctctggaattgtggaagtggttggaagagtaaccgccaaggccaccatcttgtgtacatcttatgtccagtttaaagaagatagccatccttttgatcttggactttacaatgaagctgtgaaaattatccatgacttccctcagttttatcctttagggattgtgcaacatgattgatcttgatggattttcatacgattgtaaatgagctatattaaagtctattaaaggaaaaaaaaaaaaaaaaaaaaa

SEQ ID NO: 882 - DNA, 426 bp, Artificial Sequence
  Description of Artificial sequences:primer
  misc_feature (1)..(426): 3' terminal sequence from clone image:357820. sema domain, immunoglobulin domain (ig), short basic domain, secreted, (semaphorin) 3c(SEMA3C) gene.
gatagccattctgtcatatgcatttatgacttttactacgtaaaagctgtggatttggaacttgttttcatatacaaaatcactgacaattagaattctaaagccccaaagcaggaaaggaataccacagggatatggccctcattcaattgagggatgcaacaattctagttttgcagccaccatatcgattttgaagaaaaggtgaataaagatataaataaaatctgggttaagttaaatatatttatatgcaccatgaggaccatgacatgtctagtgctagtcactatcatacaagaaaatgcatgctcatttcagttcgtgtaaaactcactttcaggagtaatccacctttttccagtaattccccttggtaaagcacaagtttctttggctcaaaatttgatcattgaagacagagct

SEQ ID NO: 883 - DNA, 381 bp, Artificial Sequence
  Description of Artificial sequences:primer
  misc_feature (1)..(381): 5' terminal sequence from clone image:357820. sema domain, immunoglobulin domain (ig), short basic domain, secreted, (semaphorin) 3c(SEMA3C) gene.
  misc_feature (308)..(308): n is a, c, g, or t
  misc_feature (325)..(325): n is a, c, g, or t
  misc_feature (349)..(349): n is a, c, g, or t
  misc_feature (364)..(364): n is a, c, g, or t
gagatgattaaccaatactgcaaagacactcggcagcaacatcagcagggagatgaatcacagaaaatgagaggggactatggcaagttaaaggccctcatcaatagtcggaaaagtagaaacaggaggaatcagttgccagagtcataatattttcttatgtgggtcttatgcttccattaacaaatgctctgtcttcaatgatcaaattttgagcaaagaaacttgtgctttaccaaggggaattactgaaaaaggtgattactcctgaagtgagttttacacgaactgaaatgagcatgcatttncttgtatgatagtgacntagcactagacatgtcatggtccncatggggcatataantatatttaactgaaccc

SEQ ID NO: 884 - DNA, 5189 bp, Artificial Sequence
  Description of Artificial sequences:primer
  misc_feature (1)..(5189): sema domain, immunoglobulin domain (ig), short basic domain, secreted, (semaphorin) 3c(SEMA3C) gene.
ggactgcgaaaggagcagggttgcggagctagggctccagcctgcggccgcgcattcttgcgtctggccagccgcgagctctaagggtcggccccgcccggtccgcccccgcggctccctgccaggctctcgcgggcgcgctcggggtggggcctcgcggctggcggagatgcggccggggctgcgcggtggtgatgcgagcctgctgggcggcgcgccggggcagccggagccgcgcgccgcggcgctgtaatcggacaccaagagcgctcgcccccggcctccggccactttccattcactccgaggtgcttgattgagcgacgcggagaagagctccgggtgccgcggcactgcagcgctgagattcctttacaaagaaactcagaggaccgggaagaaagaatttcacctttgcgacgtgctagaaaataaggtcgtctgggaaaaggactggagacacaagcgcatccaaccccggtagcaaactgatgacttttccgtgctgatttctttcaacctcggtattttcccttggatattaacttgcatatctgaagaaatggcattccggacaatttgcgtgttggttggagtatttatttgttctatctgtgtgaaaggatcttcccagccccaagcaagagtttatttaacatttgatgaacttcgagaaaccaagacctctgaatacttcagcctttcccaccatcctttagactacaggattttattaatggatgaagatcaggaccggatatatgtgggaagcaaagatcacattctttccctgaatattaacaatataagtcaagaagctttgagtgttttctggccagcatctacaatcaaagttgaagaatgcaaaatggctggcaaagatcccacacacggctgtgggaactttgtccgtgtaattcagactttcaatcgcacacatttgtatgtctgtgggagtggcgctttcagtcctgtctgtacttacttgaacagagggaggagatcagaggaccaagttttcatgattgactccaagtgtgaatctggaaaaggacgctgctctttcaaccccaacgtgaacacggtgtctgttatgatcaatgaggagcttttctctggaatgtatatagatttcatggggacagatgctgctatttttcgaagtttaaccaagaggaatgcggtcagaactgatcaacataattccaaatggctaagtgaacctatgtttgtagatgcacatgtcatcccagatggtactgatccaaatgatgctaaggtgtacttcttcttcaaagaaaaactgactgacaataacaggagcacgaaacagattcattccatgattgctcgaatatgtcctaatgacactggtggactgcgtagccttgtcaacaagtggaccactttcttaaaggcgaggctggtgtgctcggtaacagatgaagacggcccagaaacacactttgatgaattagaggatgtgtttctgctggaaactgataacccgaggacaacactagtgtatggcatttttacaacatcaagctcagttttcaaaggatcagccgtgtgtgtgtatcatttatctgatatacagactgtgtttaatgggccttttgcccacaaagaagggcccaatcatcagctgatttcctatcagggcagaattccatatcctcgccctggaacttgtccaggaggagcatttacacccaatatgcgaaccaccaaggagttcccagatgatgttgtcacttttattcggaaccatcctctcatgtacaattccatctacccaatccacaaaaggcctttgattgttcgtattggcactgactacaagtatacaaagatagctgtggatcgagtgaacgctgctgatgggagataccatgtcctgtttctcggaacagatcggggtactgtgcaaaaagtggttgttcttcctactaacaactctgtcagtggcgagctcattctggaggagctggaagtctttaagaatcatgctcctataacaacaatgaaaatttcatctaaaaagcaacagttgtatgtgagttccaatgaaggggtttcccaggtatctctgcaccgctgccacatctatggtacagcctgtgctgactgctgcctggcgcgggacccttattgcgcctgggatggccattcctgttccagattctacccaactgggaaacggaggagccgaagacaagatgtgagacatggaaacccactgactcaatgcagaggatttaatctaaaagcatacagaaatgcagctgaaattgtgcagtatggagtaaaaaataacaccacttttctggagtgtgcccccaagtctccgcaggcatctatcaagtggctgttacagaaagacaaagacaggaggaaagaggttaagctgaatgaacgaataatagccacttcacagggactcctgatccgctctgttcagggttctgaccaaggactttatcactgcattgctacagaaaatagtttcaagcagaccatagccaagatcaacttcaaagttttagattcagaaatggtggctgttgtgacggacaaatggtccccatggacctgggccagctctgtgagggctttacccttccacccgaaggacatcatgggggcattcagccactcagaaatgcagatgattaaccaatattgcaaagacactcggcagcaacatcagcagggagatgaatcacagaaaatgagaggggactatggcaagttaaaggccctcatcaatagtcggaaaagtagaaacaggaggaatcagttgccagagtcataatattttcttatgtgggtcttatgcttccattaacaaatgctctgtcttcaatgatcaaattttgagcaaagaaacttgtgctttaccaaggggaattactgaaaaaggtgattactcctgaagtgagttttacacgaactgaaatgagcatgcattttcttgtatgatagtgactagcactagacatgtcatggtcctcatggtgcatataaatatatttaacttaacccagattttatttatatctttattcaccttttcttcaaaatcgatatggtggctgcaaaactagaattgttgcatccctcaattgaatgagggccatatccctgtggtattcctttcctgctttggggctttagaattctaattgtcagtgattttgtatatgaaaacaagttccaaatccacagcttttacgtagtaaaagtcataaatgcatatgacagaatggctatcaaaagaaatagaaaaggaagacggcatttaaagttgtataaaaacacgagttattcataaagagaaaatgatgagtttttatggttccaatgaaatatgttggggtttttttaagattgtaaaaataatcagttactggtatctgtcactgacctttgtttccttattcaggaagataaaaatcagtaacctaccccatgaagatatttggtgggagttatatcagtgaagcagtttggtttatattcttatgttatcaccttccaaacaaaagcacttactttttttggaagttatttattttagactcaaagaatataatcttgcactactcagttattactgtttgttctcttattccctagtctgtgtggcaaattaaacaatataagaaggaaaaatttgaagtattagacttctaaataaggggtgaaatcatcagaaagaaaaatcaaagtagaaactactaattttttaagaggaatttataacaaatatggctagttttcaacttcagtactcaaattcaatgattcttccttttattaaaaccagtctcagatatcatactgatttttaagtcaacactatatattttatgatcttttcagtgtgatggcaaggtgcttgttatgtctagaaagtaagaaaacaatatgaggagacattctgtctttcaaaaggtaatggtacatacgttcactggtctctaagtgtaaaagtagtaaattttgtgatgaataaaataattatctcctaattgtatgttagaataattttattagaataatttcatactgaaattattttctccaaataaaaattagatggaaaaatgtgaaaaaaattattcatgctctcatatatattttaaaaacactacttttgcttttttatttaccttttaagacattttcatgcttccaggtaaaaacagatattgtaccatgtacctaatccaaatatcatataaacattttatttatagttaataatctatgatgaaggtaattaaagtagattatggcctttttaagtattgcagtctaaaacttcaaaaactaaaatcattgtcaaaattaatatgattattaatcagaatatcagaatatgattcactatttaaactatgataaattatgataatatatgaggaggcctcgctatagcaaaaatagttaaaatgctgacataacaccaaacttcattttttaaaaaatctgttgttccaaatgtgtataattttaaagtaatttctaaagcagtttattataatggtttgcctgcttaaaaggtataattaaacttcttttctcttctacattgacacacagaaatgtgtcaatgtaaagccaaaaccatcttctgtgtttatggccaatctattctcaaagttaaaagtaaaattgtttcagagtcacagttccctttatttcacataagcccaaactgatagacagtaacggtgtttagttttatactatatttgtgctatttaattctttctattttcacaattattaaattgtgtacactttcattacttttaaaaatgtagaaattcttcatgaacataactctgctgaatgtaaaagaaaattttttttcaaaaatgctgttaatgtatactactggtggttgattggttttattttatgtagcttgacaattcagtgacttaatatctattccatttgtattgtacataaaattttctagaaatacacttttttccaaagtgtaagtttgtgaatagattttagcatgatgaaactgtcataatggtgaatgttcaatctgtgtaagaaaacaaactaaatgtagttgtcacactaaaatttaattggatattgatgaaatcattggcctggcaaaataaaacatgttgaattccccaaaaaaaaaaaaaaaa

SEQ ID NO: 885 - DNA, 399 bp, Artificial Sequence
  Description of Artificial sequences:primer
  misc_feature (1)..(399): 3' terminal sequence from clone image:357893. ccr4-not transcription complex, subunit 2(CNOT2) gene.
  misc_feature (264)..(264): n is a, c, g, or t
agtagcaactatatattaggatttgcagatttgttttatatttcagaataagttatttttctttttcagctggctgcaataaaacttggccgatatggtgaagaccttctcttctatctctattacatgaatggaggagacgtattacaacttttagctcgcagtggagctttttaaccgtgattcggagataccacaaagaagaacgagtatggattaccagggcaccaggcatggagccaacaatgaaaaccaatacctatnagaggggaacatattacttctttgactgtcttaactggaggaaagtagctaaggagttccatctggaatatgacaaattagaagaacggcctcacctgccatccaccttcaactacaaccctgctcagcaagcct

SEQ ID NO: 886 - DNA, 1759 bp, Artificial Sequence
  Description of Artificial sequences:primer
  misc_feature (1)..(1759): ccr4-not transcription complex, subunit 2(CNOT2) gene.
ggcacgagaaaattcatgcgagggagacgtggtgggcggtccttcctgtgacacgacccttgagtgacagttctatttgattgcctccggtactgtgaggaaaggacacgactctatggtgaggactgatggacatacattatctgagaaaagaaactaccaggtgacaaacagcatgtttggtgcttcaagaaagaagtttgtagagggggtcgacagtgactaccatgacgaaaacatgtactacagccagtcttctatgtttccacatcggtcagaaaaagatatgctggcatcaccatctacatcaggtcagctgtctcagtttggggcaagtttatacgggcaacaaagtgcactaggccttccaatgagggggatgagcaacaatacccctcagttaaatcgcagcttatcacaaggcactcagttaccgagccacgtcacgccaacaacaggggtaccaacaatgtcacttcacacgcctccatctccaagcaggggtattttgcctatgaatcctaggaatatgatgaaccactcccaggttggtcagggcattggaattcctagcaggacaaatagcatgagcagttcagggttaggtagccccaacagaagctcgccaagcataatatgtatgccaaagcagcagccttctcgacagccttttactgtgaacagtatgtctggatttggaatgaacaggaatcaggcatttggaatgaataactccttatcaagtaacatttttaatggaacagacggaagtgaaaatgtgacaggattggacctttcagatttcccagcattagcagaccgaaacaggagggaaggaagtggtaacccaactccattaataaaccccttggctggaagagctccttatgttggaatggtaacaaaaccagcaaatgaacaatcccaggacttctcaatacacaatgaagattttccagcattaccaggctccagctataaagatccaacatcaagtaatgatgacagtaaatctaatttgaatacatctggcaagacaacttcaagtacagatggacccaaattccctggagataaaagttcaacaacacaaaataataaccagcagaaaaaagggatccaggtgttacctgatggtcgggttactaacattcctcaagggatggtgacggaccaatttggaatgattggcctgttaacatttatcagggcagcagagacagacccaggaatggtacatcttgcattaggaagtgacttaacaacattaggcctcaatctgaactctcctgaaaatctctaccccaaatttgcgtcaccctgggcatcttcaccttgtcgacctcaagacatagacttccatgttccatctgagtacttaacgaacattcacattagggataagctggctgcaataaaacttggccgatatggtgaagaccttctcttctatctctattacatgaatggaggagacgtattacaacttttagctgcagtggagctttttaaccgtgattggagataccacaaagaagaacgagtatggattaccagggcaccaggcatggagccaacaatgaaaaccaatacctatgagaggggaacatattacttctttgactgtcttaactggaggaaagtagctaaggagttccatctggaatatgacaaattagaagaacggcctcacctgccatccaccttcaactacaaccctgctcagcaagccttctaaaaaaaaaaaaaaaaaaaaaaa

SEQ ID NO: 887 - DNA, 195 bp, Artificial Sequence
  Description of Artificial sequences:primer
  misc_feature (1)..(195): 3' terminal sequence from clone image:358041. cdw52 antigen (campath-1 antigen)(CDW52) gene.
  misc_feature (52)..(52): n is a, c, g, or t
  misc_feature (54)..(54): n is a, c, g, or t
  misc_feature (194)..(194): n is a, c, g, or t
aaggggagttaacggggccagtctagagtaaggcagctgaggcaccttgggnancaaatttaaggaagagcctctcttgcctcccctagtccctgtcctggaagctgggagagctggtctctaggggctcactgtggcacccaaattgcggcccacccatgggtgaaccgggcttccctatgaacactgagaang

SEQ ID NO: 888 - DNA, 346 bp, Artificial Sequence
  Description of Artificial sequences:primer
  misc_feature (1)..(346): 5' terminal sequence from clone image:358041. cdw52 antigen (campath-1 antigen)(CDW52) gene.
  misc_feature (34)..(34): n is a, c, g, or t
  misc_feature (237)..(237): n is a, c, g, or t
  misc_feature (239)..(239): n is a, c, g, or t
  misc_feature (241)..(241): n is a, c, g, or t
  misc_feature (245)..(245): n is a, c, g, or t
  misc_feature (253)..(253): n is a, c, g, or t
  misc_feature (255)..(255): n is a, c, g, or t
  misc_feature (258)..(259): n is a, c, g, or t
  misc_feature (261)..(261): n is a, c, g, or t
  misc_feature (305)..(305): n is a, c, g, or t
agcagcccctctagcatccagcagcatgagcggnaggcattttccttttcttcgtggccaatgccataatccacctcttctgcttcagttgaggtgacacgtctcagccttagccctgtgccccctgaaacagctgccaccatcactcgcaagagaatcccctccatctttgggaggggttgatgccaggtgggggttcaggtttcctgttgggtcctgatagaatcagggcagganangnagangaagaggnanganngnggaacccatggcttggggatggggtggcagggcttcacaagccntggggtaggtgaactagggagcagttggggccaccatggcc

SEQ ID NO: 889 - DNA, 430 bp, Artificial Sequence
  Description of Artificial sequences:primer
  misc_feature (1)..(430): cdw52 antigen (campath-1 antigen)(CDW52) gene.
gacagccacgaagatcctaccaaaatgaagcgcttcctcttcctcctactcaccatcagcctcctggttatggtacagatacaaactggactctcaggacaaaacgacaccagccaaaccagcagcccctcagcatccagcagcatgagcggaggcattttccttttcttcgtggccaatgccataatccacctcttctgcttcagttgaggtgacacgtctcagccttagccctgtgccccctgaaacagctgccaccatcactcgcaagagaatcccctccatctttgggaggggttgatgccagacatcaccaggttgtagaagttgacaggcagtgccatgggggcaacagccaaaataggggggtaatgatgtaggggccaagcagtgcccagctgggggagaataaagttacccttgtactgca

SEQ ID NO: 890 - DNA, 267 bp, Artificial Sequence
  Description of Artificial sequences:primer
  misc_feature (1)..(267): 3' terminal sequence from clone image:358117. sry (sex determining region y)-box 9 (campomelic dysplasia, autosomal sex-reversal)(SOX9) gene.
tttttgttttaattaaaacctctccttacaaaataaataattttagcaagtggaatgtcttgaaggttaactgctggtgttctgagaggcacaggtgacagagcgagcaggcatctgcttccacatggggcccaggcaggcaaccgggggcagtgtgctcgggcacttattggctgctgaaacattcccagaacagatttcatctcctttgcttgccttttacctctttcttaagactgcagtgaacaagcaaaggcaggaggaaat

SEQ ID NO: 891 - DNA, 454 bp, Artificial Sequence
  Description of Artificial sequences:primer
  misc_feature (1)..(454): 5' terminal sequence from clone image:358117. sry (sex determining region y)-box 9 (campomelic dysplasia, autosomal sex-reversal)(SOX9) gene.
  misc_feature (454)..(454): n is a, c, g, or t
atttgctttctcttacaaaaagaaaaaaaaaatcctgttgtattaacatttaaaaacagaattgtgttatgtgatcagttttgggggttaactttgcttaattcctcaggctttgcgatttaaggaggagctgccttaaaaaaaaataaaggccttattttgcaattatgggagtaaacaatagtctagagaagcatttggtaagctttatcatatatatattttttaaagaagagaaaaacaccttgagccttaaaacggtgctgctgggaaacatttgcactcttttagtgcatttcctcctgcctttgcttgttcactgcagtcttaagaaagaggtaaaaggcaagcaaaggagatgaaatctgttctgggaatgtttcagcagccaataagtgcccgagcacactgcccccggttgcctgcctgggccccatgtggaaggcagatgccn

SEQ ID NO: 892 - DNA, 407 bp, Artificial Sequence
  Description of Artificial sequences:primer
  misc_feature (1)..(407): 3' terminal sequence from clone image:358162. protein predicted by clone 23627(HSU79266) gene.
  misc_feature (30)..(30): n is a, c, g, or t
  misc_feature (64)..(64): n is a, c, g, or t
  misc_feature (333)..(333): n is a, c, g, or t
  misc_feature (393)..(393): n is a, c, g, or t
  misc_feature (406)..(406): n is a, c, g, or t
accaacaaaacaagttccttttattacctnggaaaccatggaaaaagaaacctaagtgctctgncccagtcctggggctctgggaggctcacgctccctcctcaggctggggacccaggtctgtccgtgccctcatcttcctcctctgccatcgaccacctcctccagggtacgtcctcgaagtttgctctccactaacaccttgcacgtactggcaggcggtacctctcctccacgtagcgacccctcaggaacacaactctctcctctccgtccaagggcagcccgtgggcctgggcacaggtcccgtcgcttccctgagtccatccaggngccaagaggttgaccatgaagcccagaggaaagggtctgggccttgggggtgctaaaggnacgagcgaagggng

SEQ ID NO: 893 - DNA, 458 bp, Artificial Sequence
  Description of Artificial sequences:primer
  misc_feature (1)..(458): 5' terminal sequence from clone image:358162. protein predicted by clone 23627(HSU79266) gene.
  misc_feature (266)..(266): n is a, c, g, or t
  misc_feature (316)..(316): n is a, c, g, or t
caagtagccggcgtgtggccatcatgcccagtgaatcggtttatttttgtccacactgttcctctgaagaaggcatggctcggtggaagccctgcatgaggttctacagctgcctgctgccctgcgcgcctgcccgcccctccgcaagccttggcggtagatgctgccttccgagagggcaatgctgcccgcctgttccgtctgctccagaccctgccctacctgccaagttgcgctgtgcagtgccatgtgggccattgccgccngggaagccctggcccgcttcgctcgtgcctttagcacccccaagggccangaccttgcctctgggcttcatggtcaacctcttggccctggatggactcagggaagcacgggacctgtgccaggcccacgggtgcccttggacggagaggagagagttgtgttcctgaggggtcgctacgtggaggaagggc

SEQ ID NO: 894 - DNA, 1579 bp, Artificial Sequence
  Description of Artificial sequences:primer
  misc_feature (1)..(1579): protein predicted by clone 23627(HSU79266) gene.
aaaacactaaggggagcgcgcgaagctgaacttggcgctcgatgggggccgttagccgccctagagcgcgcggagccgcagaggcgtagctggactacaacgcagtgcatctcgggaggccaactcgactggactgggtgagaggacagaggtggctcgatgggcggcccgaaggccggggatcatggcgggaaggcgggcccagccaggttcagccccgccccgacccgccgctccccacccccggccggcctcgcgtgccttcccgcagcactgccgtccccgggatgctgagcgcccaccgtctccccgcagccccctcatgcccggctgcgagctgcccgtgggcacctgcccggacatgtgcccggccgccgagcgcgcccagcgcgaaagggagcaccgcctgcaccgcttggaggtggtgccgggttgccgccaggacccgccccgcgcggatccgcagcgcgcggtgaaggagtacagccgacccgccgccggcaagccccggcccccgcccagccagttgcgtccgccctccgtgctgctggccaccgtgcgctacctggccggtgaggtggcggagagcgccgacatcgcccgcgccgaggtggccagcttcgtggcagaccgcttgcgagctgtgcgcctggacctggcgctgcagggagcgggcgacgccgaggcagcggtggtgctggaggcggcgctggccacgctgctggccgtagtggcgcggctcgggcccgacgcggcgcggggacccgcggacccggtgctgctgcaggcccaggtgcaggagggcttcggctcgctgcggcgctgctacgcgcggggcgccgggccgcacccccgccaacccgccttccagggcctctttctgctctataacctgggtgagtcgggatcctggcggctgggcagagcgtggggacaggagcccaccatgacagtggaggctcggtggaagccctgcatgaggttctacagctgcctgctgccctgcgcgcctgcccgcccctccgcaaggccttggcggtagatgctgccttccgagagggcaatgctgcccgcctgttccgtctgctccagaccctgccctacctgccaagttgcgctgtgcagtgccatgtgggccatgcccgccgggaagccctggcccgcttcgctcgtgcctttagcacccccaagggccagaccttgcctctgggcttcatggtcaacctcttggccctggatggactcagggaagcacgggacctgtgccaggcccacgggctgcccttggacggagaggagagagttgtgttcctgaggggtcgctacgtggaggaagggctaccgcctgccagtacgtgcaaggtgttagtggagagcaaacttcgaggacgtaccctggaggaggtggtcatggcagaggaggaagatgagggcacggacagacctgggtccccagcctgaggagggagcgtgagcctcccagagccccaggactgggccagagcacttaggtttctttttccatggtttccaggtaataaaaggaacttgttttgttggtaaaaaaaaaaaaaaaaaa

SEQ ID NO: 895 - DNA, 144 bp, Artificial Sequence
  Description of Artificial sequences:primer
  misc_feature (1)..(144): 3' terminal sequence from clone image:358267. prefoldin 2(PFDN2) gene.
  misc_feature (39)..(39): n is a, c, g, or t
aatttaaaagtaaactttaatattgaaaatgcaaacttngggagggcagaaagatcacacacagggctgccacttcacacttggagggttgcacagcagccgggcaaaggctctcctcacttcccagatggtgctgcggctggc

SEQ ID NO: 896 - DNA, 458 bp, Artificial Sequence
  Description of Artificial sequences:primer
  misc_feature (1)..(458): 5' terminal sequence from clone image:358267. prefoldin 2(PFDN2) gene.
ctgagttggagatggagttgaatgagcacagcctagtgatcgatacactgaaggaggtagatgaaactcgtaagtgctaccgcatggttggaggagtgctggtggagcgaactgtcaaagaggtgctgcccgctttggagaacaacaaggagcagatacagaagatcattgagacactgacacagcagcttcaggcaaagggaaaagaactaaatgaattccgggaaaagcacaacattcgtctcatgggagaagatgagaagccagcagccaaggaaaactcagaaggggctggggctaaggccagctcagctggagtgttggtctcctagggaccaaggcctttgcatttttttctaccctgactcccacttctaatttctctttattgttattattattattttctctgctattgtaatatttttttgttaattaaatgttttggtcagaaaaaa

SEQ ID NO: 897 - DNA, 644 bp, Artificial Sequence
  Description of Artificial sequences:primer
  misc_feature (1)..(644): prefoldin 2(PFDN2) gene.
gctccctggggaacccagcaggcggcgaagatggcggagaacagcggtcgcgccggcaagagcagcgggagcggcgcggggaagggggcggtgtccgcagagcaggtgattgctggcttcaaccgccttcggcaggaacagcgaggcctggcatccaaagcagctgagttggagatggagttgaatgagcacagcctagtgatcgatacactgaaggaggtagatgaaactcgtaagtgctaccgcatggttggaggagtgctggtggagcgaactgtcaaagaggtgctgcccgctttggagaacaacaaggagcagatacagaagatcattgagacactgacacagcagcttcaggcaaagggaaaagaactaaatgaattccgggaaaagcacaacattcgtctcatgggagaagatgagaagccagcagccaaggaaaactcagaaggggctggggctaaggccagctcagctggagtgttggtctcctagggaccaaggcctttgcatttttttctaccctgactcccacttctaatttctctttattgttattattattattttctctgctattgtaatatttttttgttaattaaatgttttggtcagaatcttaaaaaaaaaaaaaaaaaaaaaaa

SEQ ID NO: 898 - DNA, 463 bp, Artificial Sequence
  Description of Artificial sequences:primer
  misc_feature (1)..(463): 3' terminal sequence from clone image:358683. tropomyosin 1 (alpha)(TPM1) gene.
  misc_feature (463)..(463): n is a, c, g, or t
tagcttacacagtgtttatttgacactgaaacgaagagcttctgtacaatagaaagcacagtgtgtgctggctctaaggcaggatgctaagagagagaaccagggtcagctggagaatagacaaatgcagagctcagagaggtgggacatccagctccgacgagggagtcttgggagaagtgaagcaaagaaacttatatggaagtcatatcgttgagagcgtggtccagctcctcgctgatggctttgtacttcagtttctgagcgtacagctcggtcttctaagtcatcaatgcttttctccaatttagttactgacctctccgcaaactcagccccgagtctcagcctccttcagcttgtcggaaaggaccttgatctcttcctcatatctgtcttccttctgcgagtacttctcagcctgagcctccagtgacttcaagttggtcgtcacagttttcan

SEQ ID NO: 899 - DNA, 475 bp, Artificial Sequence
  Description of Artificial sequences:primer
  misc_feature (1)..(475): 5' terminal sequence from clone image:358683. tropomyosin 1 (alpha)(TPM1) gene.
agaagctggagctggcagagaaaaaggccaccgatgctgaagccgacgtagcttctctgaacagacgcatccagctggttgaggaagagttggatcgtgcccaggagcgtctggcaacagctttgcagaagctggaggaagctgagaaggcagcagatgagagtgagagaggcatgaaagtcattgagagtcagagcccaaaaagatgaagaaaaaatggaaattcaggagatccaactgaaagaggcaaagcacattgctgaagatgccgaccgcaaatatgaagaggtggcccgtaagctggtcatcattgagagcgacctggaaccgtgcagaggagccgggctgagctctcagaaggcaaatgtgccgagcttgaagaagaattgaaaactgtgacgaacaacttgaagtcactggaggctcaggctgagaagtactcgcagaaggaagacagatatgaggaagagatcaa

SEQ ID NO: 900 - DNA, 1265 bp, Artificial Sequence
  Description of Artificial sequences:primer
  misc_feature (1)..(1265): tropomyosin 1 (alpha)(TPM1) gene.
ggcacgagggaggaatgcggtcgcccccttgggaaagtacatatctgggagaagcaggcggctccgcgctcgcactcccgctcctccgcccgaccgcgcgctcgccccgccgctcctgctgcagccccagggcccctcgccgccgccaccatggacgccatcaagaagaagatgcagatgctgaagctcgacaaggagaacgccttggatcgagctgagcaggcggaggccgacaagaaggcggcggaagacaggagcaagcagctggaagatgagctggtgtcactgcaaaagaaactcaagggcaccgaagatgaactggacaaatattctgaggctctcaaagatgcccaggagaagctggagctggcagagaaaaaggccaccgatgctgaagccgacgtagcttctctgaacagacgcatccagctggttgaggaagagttggatcgtgcccaggagcgtctggcaacagctttgcagaagctggaggaagctgagaaggcagcagatgagagtgagagaggcatgaaagtcattgagagtcgagcccaaaaagatgaagaaaaaatggaaattcaggagatccaactgaaagaggcaaagcacattgctgaagatgccgaccgcaaatatgaagaggtggcccgtaagctggtcatcattgagagcgacctggaacgtgcagaggagcgggctgagctctcagaaggccaagtccgacagctggaagaacaattaagaataatggatcagaccttgaaagcattaatggctgcagaggataagtactcgcagaaggaagacagatatgaggaagagatcaaggtcctttccgacaagctgaaggaggctgagactcgggctgagtttgcggagaggtcagtaactaaattggagaaaagcattgatgacttagaagacgagctgtacgctcagaaactgaagtacaaagccatcagcgaggagctggaccacgctctcaacgatatgacttccatgtaaacgttcatccactctgcctgcttacaccctgccctcatgctaatataagtttctttgcttcacttctcccaagactccctcgtcgagctggatgtcccacctctctgagctctgcatttgtctattctccagctgaccctggttctctctcttagcatcctgccttagagccaggcacacactgtgctttctattgtacagaagctcttcgtttcagtgtcaaataaacactgtgtaagctaaaaaaaaaaaaaaaaaaa

SEQ ID NO: 901 - DNA, 451 bp, Artificial Sequence
  Description of Artificial sequences:primer
  misc_feature (1)..(451): 3' terminal sequence from clone image:358943. hypothetical protein flj21272(FLJ21272) gene.
  misc_feature (303)..(303): n is a, c, g, or t
  misc_feature (329)..(329): n is a, c, g, or t
  misc_feature (365)..(365): n is a, c, g, or t
  misc_feature (443)..(443): n is a, c, g, or t
tcagtttaaagcactttattaaccacacatacatattttccagtgtctaattctcatcgtgttcttttccattccagacttccctgtctctttcccagagctctgttcctcttctcactgtttctggaaggcagttgcactcaaaagtgaagtcaccagtctgccgacagtggcctccattgacacaaggcgagggtgcacagggcacatacaggctgtcacagtactgggcctgtgaagccctgaaggcactggcactggtaggaaccaggcaggttgaggcaggtgccaccattgctgggnagtgtcctggaatgtcacactcattnacatcagtctgcacacttctgccctgtggaagcccngtgaaggcatttgcaggaagaaactgggttggcccacagtggtacagggtacttccatttggcacaggggatgaaganaggcaggg

SEQ ID NO: 902 - DNA, 473 bp, Artificial Sequence
  Description of Artificial sequences:primer
  misc_feature (1)..(473): 5' terminal sequence from clone image:358943. hypothetical protein flj21272(FLJ21272) gene.
  misc_feature (137)..(137): n is a, c, g, or t
  misc_feature (261)..(261): n is a, c, g, or t
cctatgagtgcacctgtcaagtcgggtttacaggtaaggagtgccaatggaccgatgcctgcctgtctcatccctgtgcaaatggaagtacctgtaccactgtggccaaccagttctcctgcaaatgcctcacaggnttcacagggcagaagtgtgagactgatgtcaatgagtgtgacattccaggacactgccagcatggtggcacctgcctcaacctgcctggttcctaccagtgccagtgccttcagggcttcacanggccagtactgtgacagcctgtatgtgccctgtgcaccctcgccttgtgtcaatggaggcacctgtcggcagactggttgactttcactttttgagttgcaactggccttccagaaacaagtgagaagaggaacagagctctgggaaaagagacagggaaagtctggaattggaaaagaacacgaatgagaattagacacttgggaaaatat

SEQ ID NO: 903 - DNA, 3745 bp, Artificial Sequence
  Description of Artificial sequences:primer
  misc_feature (1)..(3745): hypothetical protein flj21272(FLJ21272) gene.
gtgccatcacttgttcaaatagccacagcccttgtgactccaaccagcctcacaagaacatcaacatcacctttgaggaagacaaagtcaactcaactctggttgtagacagagaatcctctcatgatgaatgtcaggatgctgtaaacattctcccagtccctggccccacctcttctgccacaaacgtcagcatggtggtatcagccggccctttgtccagcgagaaggcagagatgaacattctagaaatcaacgagaaattgcatccccagctggcagagaagaaacagcagttcagaaacctcaaagagaaatgttttgtaactcaactggcctgcttcctggccaaccagcagaacaaatacaaaaatgaagagtgcaaagacctcataaaatctatgctgaggaatgagcgacagttcaaggaggagaagcttgcagagcagctcaagcaagctgaggagctcaggcaatataaagtcctggttcactctcaggaacgagagctgacccagttaagggagaagttacgggaagggagagatgcctcctgctcattgaatcagcatctccaggccctcctcactccggatgagccagacaagtcccaggggcaggacctccaagaacagctggctgaggggtgtagactggcacagcaccttgtccaaaagctcagcccagaaaatgacaacgatgacgatgaagatgttcaagttgaggtggctgagaaagtgcagaaatcgtctgcccccagggagatgccgaaggctgaagaaaaggaagtccctgaggactcactggaggaatgtgccatcacttgttcaaatagccatggcccttatgactccaaccagccacataggaaaaccaaaatcacatttgaggaagacaaagtcgactcaactctcattggctcatcctctcatgttgaatgggaggatgctgtacacattatcccagaaaatgaaagtgatgatgaggaagaggaagaaaaagggccagtgtctcccaggaatctgcaggagtctgaagaggaggaagtcccccaggagtcctgggatgaaggttattcgactctctcaattcctcctgaaatgttggcctcgtacaagtcttacagcggcacatttcactcattagaggaacagcaagtctgcatggctgttgacataggcggacatcggtgggatcaagtgaaaaaggaggaccaagaggcaacaggtcccaggctcagcagggagctgctggatgagaaagggcctgaagtcttgcaggactcactggatagatgttattcaactccttcaggttatcttgaactgactgactcatgccagccctacagaagtgccttttacatattggagcaacagcgtgttggctgggctcttgacatggatgaaattgaaaagtaccaagaagtggaagaagaccaagacccatcatgccccaggctcagcagggagctgctggatgagaaagagcctgaagtcttgcaggactcactggatagatgttattcgactccttcaggttatcttgaactgcctgacttaggccagccctacagaagtgctgtttactcattggaggaacagtaccttggcttggctcttgacgtggacagaattaaaaaggaccaagaagaggaagaagaccaaggcccaccatgccccaggctcagcagggagctgctggaggcagtagagcctgaagtcttgcaggactcactggatagatgttattcaactccttccagttgtcttgaacagcctgactcctgcctgccctatggaagttccttttatgcattggaggaaaaacatgttggcttttctcttgacgtgggagaaattgaaaagaaggggaaggggaagaaaagaaggggaagaagatcaacgaagaaaagaaggagaaggggaagaaaagaaggggaagaagatcaaaacccaccatgccccaggctcagcggtgtgctgatggaagtggaagagcctgaagtcttacaggactcactggatagatgttattcgactccgtcaatgttctttgaactacctgactcattccagcactacagaagtgtgttttactcatttgaggaacagcacatcagcttcgcccttgacgtggacaataggtttcttactttgatgggaagaagtctccacctggtcttccagatgggagtcatattcccacaataagcagcccttactaagccgagagatgtcattcctgcaggcaggacctataggcacgtgaagatttgaatgaaactatagttccatttggaagcccagacataggatgggtcagtgggcatggctctattcctattctcagaccatgccagtggcaacctgtgctcagtctgaagacaatggacccaagttaggtgtgacacgttcacataactgtgcagcacatgccgggagtgatcagtcagacattttaatttgaaccacgtatctctgggtagctacaaagttcctcagggatttcattttgcaggcatgtctctgagcttctatacctgctcaaggtcagtgtcatctttgtgtttagctcatccaaaggtgttaccctggtttcaatgaacctaacctcattctttgtatcttcagtgttgaattgttttagctgatccatctttaacgcaggagggatccttggctgaggattgtatttcagaaccaccaactgctcttgacaattgttaacccgctaggctcctttggttagagaagccacagtccttcagcctccaattggtgtcagtacttaggaagaccacagctagatggacaaacagcattgggagaccttagccctgctcctctcgattccatcctgtagagaacaggagtcaggagccgctggcaggagacagcatgtcacccaggactctgccggtgcagaatatgaacaacgccatgttcttgcagaaaacgcttagcctgagtttcataggaggtaatcaccagacaactgcagaatgtagagcactgagcaggacaactgacctgtctccttcacatagtccatatcaccacaaatcacacaacaaaaaggagaagagatattttgggttcaaaaaaagtaaaaagataatatagctgcatttctttagttattttgaaccccaaatatttcctcatctttttgttgttgtcattgatggtggtgacatggacttgtttatagaggacaggtcagctgtctggctcaatgatctacattctgaagttgtctgaaaatgtcttcatgattaaattcagcctaaacgttttgccgggaacactgcagagacaatgctgtgagtttccaaccttagcccatctgcgggcagagaaggtctagtttgtccatcagcattatcatgatatcaggactggttacttggttaaggaggggtctaggagatctgtcccttttagagacaccttacttataatgaagtatttgggagggtggttttcaaaagtagaaatgtcctgtattccgatgatcatcctgtaaacattttatcatttattaatcatccctgcctgtgtctattattatattcatatctctacgctggaaactttctgcctcaatgtttactgtgcctttgtttttgctagtttgtgttgttgaaaaaaaaaacattctctgcctgagttttaatttttgtccaaagttattttaatctatacaattaaaagcttttgcctatcaaaaaaaaaaaaaaaaa

SEQ ID NO: 904 - DNA, 498 bp, Artificial Sequence
  Description of Artificial sequences:primer
  misc_feature (1)..(498): 3' terminal sequence from clone image:358993. proteasome (prosome, macropain) 26s subunit, atpase, 2(PSMC2) gene.
  misc_feature (232)..(232): n is a, c, g, or t
  misc_feature (316)..(316): n is a, c, g, or t
  misc_feature (421)..(421): n is a, c, g, or t
  misc_feature (430)..(430): n is a, c, g, or t
  misc_feature (433)..(433): n is a, c, g, or t
  misc_feature (446)..(446): n is a, c, g, or t
  misc_feature (458)..(459): n is a, c, g, or t
  misc_feature (469)..(469): n is a, c, g, or t
  misc_feature (481)..(481): n is a, c, g, or t
  misc_feature (483)..(483): n is a, c, g, or t
  misc_feature (496)..(496): n is a, c, g, or t
ttttttttttttttttttttttttttacaattttgaagccatttatttgtttatgaattggttattaacaagtctatataaggttaggattccaatttaaagttttcacttgaaagccttcagggttcagttgtatgtcatgtaacgaggagtagcactgaatttggcataagacttaatgaccttatttacagcttccaagaaatccttctcggtagcaatttttcgccgngctctgatggcaaacataccagcctctgtgcagacgcttctaatctcagcaccagtgctatttggacacagtcgtgctaacagntcaaatctcgatatctctttcaacactcattgaacgagcgtgaatcttaaatatgtgggtccgaccctctagatcgggcaagctaaatcaatttttctatccaanctccctggnctnatcagtgctgggntcccaagtatcnnggtctgttangggccatcagcncnttaatattggccncg

SEQ ID NO: 905 - DNA, 1545 bp, Artificial Sequence
  Description of Artificial sequences:primer
  misc_feature (1)..(1545): proteasome (prosome, macropain) 26s subunit, atpase, 2(PSMC2) gene.
gaagacaccaccggaagcaaggaaggtgctgtgtaatcattaaggagcggaggcttttggagctgctaaaatgccggattacctcggtgccgatcagcggaagaccaaagaggatgagaaggacgacaagcccatccgagctctggatgagggggatattgccttgttgaaaacttatggtcagagcacttactctaggcagatcaagcaagttgaagatgacattcagcaacttctcaagaaaattaatgagctcactggtattaaagaatctgacactggcctggccccaccagcactctgggatttggctgcagataagcagacactccagagtgaacagcctttacaggttgccaggtgtacaaagataatcaatgctgattcggaggacccaaaatacattatcaacgtaaagcagtttgccaagtttgtggtggaccttagtgatcaggtggcacctactgacattgaagaagggatgagagtgggcgtggatagaaataaatatcaaattcacattccattgcctcctaagattgacccaacagttaccatgatgcaggtggaagagaaacctgatgtcacatacagtgatgttggtggctgtaaggaacagattgagaaactgcgagaagtagttgaaaccccattacttcatccagagaggtttgtgaaccttggcattgagcctcccaagggcgtgctgctctttggtccacccggtacaggcaagacactctgtgcgcgggcagttgctaatcggactgatgcgtgcttcattcgagttattggatctgagcttgtacagaaatacgtcggtgagggggctcgaatggttcgtgaactctttgaaatggccagaacaaaaaaagcctgccttatcttctttgatgaaattgatgctattggaggggctcgttttgatgatggtgctggaggtgacaatgaagtgcagagaacaatgttggaactgatcaatcagcttgatggttttgatcctcgaggcaatattaaagtgctgatggccactaacagacctgatactttggatccagcactgatgaggccagggagattggatagaaaaattgaatttagcttgcccgatctagagggtcggacccacatatttaagattcacgctcgttcaatgagtgttgaaagagatatcagatttgaactgttagcacgactgtgtccaaatagcactggtgctgagattagaagcgtctgcacagaggctggtatgtttgccatcagagcacggcgaaaaattgctaccgagaaggatttcttggaagctgtaaataaggtcattaagtcttatgccaaattcagtgctactcctcgttacatgacatacaactgaaccctgaaggctttcaagtgaaaactttaaattggaatcctaaccttatatagacttgttaataaccaattcataaacaaataaatggcttcaaaattgtatgcttttttccatatctcttcttgtaatataataaaaggtgatttctaatgttaaaaaaaaaaaaaaaaaaa

SEQ ID NO: 906 - DNA, 484 bp, Artificial Sequence
  Description of Artificial sequences:primer
  misc_feature (1)..(484): 3' terminal sequence from clone image:359119. cdc28 protein kinase regulatory subunit 2(CKS2) gene.
ttttttttttttttttaaatgcaacatacaaactttattgaacaaaagtaaactgtttcagtaaactcaaacaggcacttaagagaaaaactgactggaagaacttttatcttaaacatcttacagtaacctacttgcagttgcatttaactgagctctgttgctgtgaagaatacagctcatgcacaggtatggatgaaagatttgtacatttctcaagtattcactgaatactaccttatatacacatatacattaaatttgaaaaagatttgacgatccccagataaacttcatttttgttgatcttttggaagaggtcgtctaaagagaagaatatgtggttctggctcatgaatcatggtaatgaacccagcctagactctgttggacaccaagtctcctccactcctcttcagacatcagatgagttttaggtacttgtttggaaagttctctggggtaacataacatgccggtacta

SEQ ID NO: 907 - DNA, 627 bp, Artificial Sequence
  Description of Artificial sequences:primer
  misc_feature (1)..(627): cdc28 protein kinase regulatory subunit 2(CKS2) gene.
agtctccggcgagttgttgcctgggctggacgtggttttgtctgctgcgcccgctcttcgcgctctcgtttcattttctgcagcgcgccacgaggatggcccacaagcagatctactactcggacaagtacttcgacgaacactacgagtaccggcatgttatgttacccagagaactttccaaacaagtacctaaaactcatctgatgtctgaagaggagtggaggagacttggtgtccaacagagtctaggctgggttcattacatgattcatgagccagaaccacatattcttctctttagacgacctcttccaaaagatcaacaaaaatgaagtttatctggggatcgtcaaatctttttcaaatttaatgtatatgtgtatataaggtagtattcagtgaatacttgagaaatgtacaaatctttcatccatacctgtgcatgagctgtattcttcacagcaacagagctcagttaaatgcaactgcaagtaggttactgtaagatgtttaagataaaagttcttccagtcagtttttctcttaagtgcctgtttgagtttactgaaacagtttacttttgttcaataaagtttgtatgttgcatttaaaaaaaaaaaaaaa

SEQ ID NO: 908 - DNA, 486 bp, Artificial Sequence
  Description of Artificial sequences:primer
  misc_feature (1)..(486): 3' terminal sequence from clone image:359147. nadh dehydrogenase (ubiquinone) 1 alpha subcomplex, 9, 39kda(NDUFA9) gene.
  misc_feature (406)..(406): n is a, c, g, or t
  misc_feature (419)..(419): n is a, c, g, or t
  misc_feature (473)..(473): n is a, c, g, or t
  misc_feature (478)..(478): n is a, c, g, or t
  misc_feature (483)..(483): n is a, c, g, or t
tttcaacctgaaatgttttaatagtggaactgtgtacaggatcctctaaagagaccgcctggctgggtgctcaaaccacatgggccgacccaaaagacgccaaaaccaagagctgctcaggaggcactaaatgttgacggtcttggccggcttcacatcctcaatttcagcagacagccagcggtaagtgcgatgacgccgcagcacctcaatggccttgagttccagtggtgttgcctgaataccaaggtcttctaagccaggcaggtgatggcaatttcatgtctgtgatgtgcatccgctccactttatcccttgttatccagggctcaaatggggcttatttcaaagactcttgctacccatcgataggcaaaaagcggcaaggggaatgggaggaaccatntgtgagccacagncaagatgtacttcaccaggtgggaaaaaggaggttaccgattgggaccaaccgnaagcnaaagnttg

SEQ ID NO: 909 - DNA, 1343 bp, Artificial Sequence
  Description of Artificial sequences:primer
  misc_feature (1)..(1343): nadh dehydrogenase (ubiquinone) 1 alpha subcomplex, 9, 39kda(NDUFA9) gene.
ggcacgagggtgggaaaagatggcggctgccgcacaatcccgggttgtccgggtcctgtcaatgtcacgttctgccattactgcaatagccacatctgtgtgtcacggcccaccctgtcgccagcttcatcatgccctcatgcctcatgggaaaggtggacgttcctcagtcagtgggattgtggccactgtgtttggagcaacaggattcctggggcgatatgttgtcaaccaccttggacgcatggggtcacaggtaatcataccctatcggtgtgataaatatgacatcatgcaccttcgtcccatgggtgacctgggccagcttctgtttctggaatgggacgcgagagataaagattctatccgacgagtagtacaacacagcaatgtggtcatcaatcttattggacgagactgggaaaccaaaaactttgattttgaggatgtttttgtgaagattccccaagcaattgctcaactgtccaaggaagctggagttgaaaaattcattcatgtttcacatctgaatgcgaatattaaaagctcttctagatatttgagaaataaggctgttggagagaaagtagtgagagatgcatttccggaagccattatcgtaaagccgtcggacatctttggaagagaggatagattccttaattcttttgcaagtatgcatcggtttggtcctataccccttggttccttgggctggaagacagttaaacaaccagtatatgtcgtagatgtatccaaaggaattgttaatgcagttaaggatcctgatgccaatgggaaatcctttgctttcgttggtcccagtcggtacctccttttccacctggtgaagtacatctttgctgtggctcacagattgttcctcccattccccttgccgctttttgcctatcgatgggtagcaagagtctttgaaataagcccatttgagccctggataacaagggataaagtggagcggatgcacatcacagacatgaaattgcctcacctgcctggcttagaagaccttggtattcaggcaacaccactggaactcaaggccattgaggtgctgcggcgtcatcgcacttaccgctggctgtctgctgaaattgaggatgtgaagccggccaagaccgtcaacatttagtgcctcctgagcagctcttggttttggcgtcttttgggtcggcccatgtggtttgagcacccagccaggcggtctctttagaggatcctgtacacagttccactattaaaacatttcaggttgaaaaaaaaaaaaaaaaaaaaaaaaaaaaaaaaaaaaaaaaaaaaaaaaaaaaaaaaaaaaaaaaaaa

SEQ ID NO: 910 - DNA, 479 bp, Artificial Sequence
  Description of Artificial sequences:primer
  misc_feature (1)..(479): 3' terminal sequence from clone image:359191. protein kinase h11(H11) gene.
  misc_feature (478)..(478): n is a, c, g, or t
tttaagaacgtcagctcctttattattattattattattattaattatttactgttatttacccctaaacaacagcataactcaaataataatgacacacacgtcccgcccatatacacaataccactagcctatctgtcaggctatctggcctttgcttggttcctgatggagctgtctggagacagtccctctgtaaaaatcccgacttaaacacaggggacagaagaaaggggggacctaggtcagatcataaactgacaggctcccagcgtccttagggagtgctaatgtggaaactttgagaacgtgctggacacatctgggcagagggcagaaggcactgtttgtttttatgtggttgatggataaattccatatggggatataagacctgtatatcacccattttaggccaggcatgtggaagcacagtggggttagctactgggtttcattaaccaaccatgcggcatgng

SEQ ID NO: 911 - DNA, 2010 bp, Artificial Sequence
  Description of Artificial sequences:primer
  misc_feature (1)..(2010): protein kinase h11(H11) gene.
gccacagcccagctgttccctccgcggattctccggggctggttcatcacctccgaatattcctgtgacaggagacgcttgcaaaacccgcctccagcctccagcagcaaataaatagaaggcttgcagcccagaaggagccagaagaagtttctaggcacgaggccctgggtttattaagctcctggctccgctctagacctcagcggttctggctgccagcctgggcagcctgggaagcctgggaggacggtggcttgccggtctgtcgtgaggcagtgcggacggggaccctctgggattctgctggatctgccccgggggttacctttgggggctgggaccccagtcgaggggacacaaccgtccctggcagtggttggttctgcttctccctgcagaaaagcagcattttcggaagctgaagaataagctagcccagccacaccaccttgttgtgtgaccttgggcaggtggttctgtctctctgagcctctgtttctctctgagctgagcagccaccatggctgacggtcagatgcccttctcctgccactacccaagccgcctgcgccgagaccccttccgggactctcccctctcctctcgcctgctggatgatggctttggcatggaccccttcccagacgacttgacagcctcttggcccgactgggctctgcctcgtctctcctccgcctggccaggcaccctaaggtcgggcatggtgccccggggccccactgccaccgccaggtttggggtgcctgccgagggcaggacccccccacccttccctggggagccctggaaagtgtgtgtgaatgtgcacagcttcaagccagaggagttgatggtgaagaccaaagatggatacgtggaggtgtctggcaaacatgaagagaaacagcaagaaggtggcattgtttctaagaacttcacaaagaaaatccagcttcctgcagaggtggatcctgtgacagtatttgcctcactttccccagagggtctgctgatcatcgaagctccccaggtccctccttactcaacatttggagagagcagtttcaacaacgagcttccccaggacagccaggaagtcacctgtacctgagatgccagtactggcccatccttgttttgtccccaaccctagggcttctctgattccaggatacattactttagctgaactcagatttagtgcaagtaaaatgttagagggtgcgggggtgaggactgaccacagattccctggatagtgtagtggtagatttctccacaggatagcgcaattggcaaatcatgcttggttgtgttaggccaaaatactagttttgctttctttaccttttctatcttgatgaaaatgttgcacattctatagttgcaaaacacataaaaggggacttaacatttcacgttgtatcttacttgcagtgaatgcaagggttacttttctctggggacctcccccatcacccaggttcctactctgggctcccgattcccatggctcccaaaccatgccgcatggtttggttaatgaaacccagtagctaaccccactgtgcttccacatgcctggcctaaaatgggtgatatacaggtcttatatccccatatggaatttatccatcaaccacataaaaacaaacagtgccttctgccctctgcccagatgtgtccagcacgttctcaaagtttccacattagcactccctaaggacgctgggagcctgtcagtttatgatctgacctaggtcccccctttcttctgtcccctgtgtttaagtcgggatttttacagagggagctgtctccagacagctccatcaggaaccaagcaaaggccagatagcctgacagataggctagtggtattgtgtatatgggcgggacgtgtgtgtcattattatttgagttatgctgttgtttaggggtaaataacagtaaataattaataataataataataataataataaaggagctgacgttcttaaaaaa

SEQ ID NO: 912 - DNA, 459 bp, Artificial Sequence
  Description of Artificial sequences:primer
  misc_feature (1)..(459): 3' terminal sequence from clone image:359250. carbonic anhydrase iv(CA4) gene.
  misc_feature (143)..(143): n is a, c, g, or t
  misc_feature (168)..(168): n is a, c, g, or t
  misc_feature (422)..(422): n is a, c, g, or t
  misc_feature (458)..(458): n is a, c, g, or t
tccaaaaatatgtccatattttaatcatgcctaaagtcccacctgggaaggctaaggaccggaagcctggaacttggagagctgaggcaacagagaggctgcgtgcagaagtgagccatcatcgcaggaagccggccagcagncaggccagcatggggcccagcaggnagagcagggccagggcagcggccgacccggggccccggactttatcaccgtgcgctgccccagctgctgcaggggcctgacattgtccttcatgctcactgtctgttccttgtcgtagtacagcttctgagagaatgccaggatctgcggaagtgatggggctcagcaggtcggggcagggggagctgcactccctgccgtgtgacctcaggcaggcacctcatcctgtcctgggagccctcattaggaaagangggctcttgaacccctgggctctcaaggtggtcgtna

SEQ ID NO: 913 - DNA, 486 bp, Artificial Sequence
  Description of Artificial sequences:primer
  misc_feature (1)..(486): 5' terminal sequence from clone image:359250. carbonic anhydrase iv(CA4) gene.
  misc_feature (460)..(460): n is a, c, g, or t
ctgaatcaggaactctgggggtggagcccaggcatctggggcccaacaagcccgccccccagctgatgctaacgcatgctcaagtttgagagccacagtcctgtagtaagagtgacaagagaagcaggcattgcgggccacctggggtgtgagtgaaaggaagccaatgggcacttagccttcacccatgccacgcacctcatttacatcccctattcttatcatcttcacgaccaccttgagagccaggggttcagagcccctctttcctaatgagggctcccaggacaaggatgaggtgcctgcctgaggtcacacggcagggagtgcagctccccctgccccgacctgctgagccccatcacttccgcagatcctggcattctctcagaagctgttacttacgacaaggaacagacagtgagcatgaaggacaatgtcaggcccctgcagcagcttnggggaagcgcacggtgataaagtccg

SEQ ID NO: 914 - DNA, 1104 bp, Artificial Sequence
  Description of Artificial sequences:primer
  misc_feature (1)..(1104): carbonic anhydrase iv(CA4) gene.
ctcggtgcgcgaccccggctcagaggactctttgctgtcccgcaagatgcggatgctgctggcgctcctggccctctccgcggcgcggccatcggccagtgcagagtcacactggtgctacgaggttcaagccgagtcctccaactacccctgcttggtgccagtcaagtggggtggaaactgccagaaggaccgccagtcccccatcaacatcgtcaccaccaaggcaaaggtggacaaaaaactgggacgcttcttcttctctggctacgataagaagcaaacgtggactgtccaaaataacgggcactcagtgatgatgttgctggagaacaaggccagcatttctggaggaggactgcctgccccataccaggccaaacagttgcacctgcactggtccgacttgccatataagggctcggagcacagcctcgatggggagcactttgccatggagatgcacatagtacatgagaaagagaaggggacatcgaggaatgtgaaagaggcccaggaccctgaagacgaaattgcggtgctggcctttctggtggaggctggaacccaggtgaacgagggcttccagccactggtggaggcactgtctaatatccccaaacctgagatgagcactacgatggcagagagcagcctgttggacctgctccccaaggaggagaaactgaggcactacttccgctacctgggctcactcaccacaccgacctgcgatgagaaggtcgtctggactgtgttccgggagcccattcagcttcacagagaacagatcctggcattctctcagaagctgtactacgacaaggaacagacagtgagcatgaaggacaatgtcaggcccctgcagcagctggggcagcgcacggtgataaagtccggggccccgggtcggccgctgccctgggccctgcctgccctgctgggccccatgctggcctgcctgctggccggcttcctgcgatgatggctcacttctgcacgcagcctctctgttgcctcagctctccaagttccaggcttccggtccttagccttcccaggtgggactttaggcatgattaaaatatggacatatttttggag

SEQ ID NO: 915 - DNA, 277 bp, Artificial Sequence
  Description of Artificial sequences:primer
  misc_feature (1)..(277): 3' terminal sequence from clone image:359254. protease, serine, 3 (mesotrypsin)(PRSS3) gene.
  misc_feature (56)..(56): n is a, c, g, or t
  misc_feature (145)..(145): n is a, c, g, or t
ttgagagcagggccactttattggtatagagactgcagagggaccgggggctttanctgttggcagcgatggtgtccttaatccagtccacatagttgtagaccttggtgtagactccaggcctgttcttccaggcacagccatnggccccaggagacaactccttggagctgtccgttgcagaccacagggccaccagagtcacgctggcaggaatccttgcctccctcaaggaagcccacacagaacatgctgttggtaatctttccagggtagg

SEQ ID NO: 916 - DNA, 483 bp, Artificial Sequence
  Description of Artificial sequences:primer
  misc_feature (1)..(483): 5' terminal sequence from clone image:359254. protease, serine, 3 (mesotrypsin)(PRSS3) gene.
acggctgcgaggcgctgggcacagttgctgtcccctttgacgatgatgacaagattgttgggggctacacctgtgaggagaattctctcccctaccaggtgtccctgaattctggctcccacttctgcggtggctccctcatcagcgaacagtgggtggtatcagcagctcactgctacaagacccgcatccaggtgagactgggagagcacaacatcaaagtcctggaggggaatgagcagttcatcaatgcggccaagatcatccgccaccctaaatacaacaagggacactctggacaatgacatcatgctgatcaaactctcctcacctgccgtcatcaatgcccgcgtgtccaccatctctctgcccaccgcccctccagctgctggcactggagtgcttcatctccggctgggggcaacactctgagctttggtgctgactacccagacgaagctgaagtgcctggatgctccgggg

SEQ ID NO: 917 - DNA, 807 bp, Artificial Sequence
  Description of Artificial sequences:primer
  misc_feature (1)..(807): protease, serine, 3 (mesotrypsin)(PRSS3) gene.
acactctaccaccatgaatccattcctgatccttgcctttgtgggagctgctgttgctgtcccctttgacgatgatgacaagattgttgggggctacacctgtgaggagaattctctcccctaccaggtgtccctgaattctggctcccacttctgcggtggctccctcatcagcgaacagtgggtggtatcagcagctcactgctacaagacccgcatccaggtgagactgggagagcacaacatcaaagtcctggaggggaatgagcagttcatcaatgcggccaagatcatccgccaccctaaatacaacagggacactctggacaatgacatcatgctgatcaaactctcctcacctgccgtcatcaatgcccgcgtgtccaccatctctctgcccaccgcccctccagctgctggcactgagtgcctcatctccggctggggcaacactctgagctttggtgctgactacccagacgagctgaagtgcctggatgctccggtgctgacccaggctgagtgtaaagcctcctaccctggaaagattaccaacagcatgttctgtgtgggcttccttgagggaggcaaggattcctgccagcgtgactctggtggccctgtggtctgcaacggacagctccaaggagttgtctcctggggccatggctgtgcctggaagaacaggcctggagtctacaccaaggtctacaactatgtggactggattaaggacaccatcgctgccaacagctaaagcccccggtccctctgcagtctctataccaataaagtggccctgctctc

SEQ ID NO: 918 - DNA, 487 bp, Artificial Sequence
  Description of Artificial sequences:primer
  misc_feature (1)..(487): 3' terminal sequence from clone image:360588. Has moderate similarity to protein ref:np_036199.1 (h.sapiens) aldo-keto reductase family 7, member a3 (aflatoxin aldehyde reductase).
  misc_feature (4)..(4): n is a, c, g, or t
  misc_feature (196)..(196): n is a, c, g, or t
  misc_feature (381)..(381): n is a, c, g, or t
  misc_feature (426)..(426): n is a, c, g, or t
  misc_feature (449)..(449): n is a, c, g, or t
  misc_feature (467)..(467): n is a, c, g, or t
  misc_feature (483)..(483): n is a, c, g, or t
gcgnccgccaactccagggagctgatgcttccaaccactgcacgttgctcccgggctgtcgcagtctcctgttgccgccatcatgtcccggccctccacggtgttgggtgccatggagatggggcgccgtagtcacccgcgccttcctggagcacggccacaccaagatagacacggccttcgtgtacagcgacancaagtccaagaccatcctgggtggcctgaaaattgataccaaggccaatccattgttttgggaactccctgaaaccttgacagtctccggttccagctggaagaccgtcacttgaaagtggcttgcagtgtcccccgagtggacctcttctaccctgcttcaagggccaagacccacaagcaacncccgggtggggaaagaagaccacttgaagttgccttggccaaccnagcttgcaaccaaggaaggggcnaagtttccttgggattcnttggggccttcttccnaaat

SEQ ID NO: 919 - DNA, 484 bp, Artificial Sequence
  Description of Artificial sequences:primer
  misc_feature (1)..(484): 3' terminal sequence from clone image:361108. likely ortholog of mouse hypoxia induced gene 1(HIG1) gene.
  misc_feature (187)..(187): n is a, c, g, or t
  misc_feature (366)..(366): n is a, c, g, or t
  misc_feature (378)..(378): n is a, c, g, or t
  misc_feature (406)..(406): n is a, c, g, or t
  misc_feature (423)..(423): n is a, c, g, or t
  misc_feature (430)..(430): n is a, c, g, or t
  misc_feature (449)..(449): n is a, c, g, or t
  misc_feature (457)..(457): n is a, c, g, or t
  misc_feature (464)..(464): n is a, c, g, or t
  misc_feature (472)..(472): n is a, c, g, or t
  misc_feature (480)..(480): n is a, c, g, or t
tgagatggagtttcgttcttgttgcccaggctggacccttgctgagggacccaacaaacaaacaaaaacaggacataaatcgttttttaaaaatagcaagaaagttggtagtttttcttataattatctcacatctggctgactctaattctccaacaggtcaatggagcaaaaggttttttttttngtctcctttcaggagggagggggttagttgtctctttcctgtatataaatcaagaacagaagaaaaacctatttctccgttcttcatctaatgatacagactctgaagcttgtatggatagggcattttgacctgggtttcagaaaagtagcccctgcggttaaagcatccaggggttntgggggaaaccnaaaattggtccattaattttggccttgnaaaccgaccggattgantaatccnggtccctgttgaatttccnggaattanccctttnttggggtngcaatttnccct

SEQ ID NO: 920 - DNA, 298 bp, Artificial Sequence
  Description of Artificial sequences:primer
  misc_feature (1)..(298): 5' terminal sequence from clone image:361108. likely ortholog of mouse hypoxia induced gene 1(HIG1) gene.
  misc_feature (126)..(126): n is a, c, g, or t
  misc_feature (254)..(254): n is a, c, g, or t
  misc_feature (259)..(259): n is a, c, g, or t
  misc_feature (275)..(275): n is a, c, g, or t
  misc_feature (284)..(284): n is a, c, g, or t
ccttccagtcctggtcttgcttttctccccgacctggtgtttcctccaccctgggaaagtgataaggcctagggtcctgtgtagtgcttctgtgaccgaattaaatttttctcctgccgagtcagngggtttagagattacaaagcacagcgtaaagggcagaattaggagcagccgacatgatgcagcagtgatattcgcctttgtcttaaattcccggagtgggaagcagctatttccctcttcggagtaanccccnccgacaggggattccntgggttccnggaaagttaaaaag

SEQ ID NO: 921 - DNA, 1362 bp, Artificial Sequence
  Description of Artificial sequences:primer
  misc_feature (1)..(1362): likely ortholog of mouse hypoxia induced gene 1(HIG1) gene.
gggggggaggactgggtgcgcctgcagggatcggaagccggttggggtgtgagaggttttctcgctctagggagattcttcaagcaatcactatgtcaacagacacaggtgtttcccttccttcatatgaggaagatcagggatcaaaactcattcgaaaagctaaagaggcaccattcgtacccgttggaatagcgggttttgcagcaattgttgcatatggattatataaactgaagagcaggggaaatactaaaatgtccattcatctgatccacatgcgtgtggcagcccaaggctttgttgtaggagcaatgactgttggtatgggctattccatgtatcgggaattctgggcaaaacctgagccttagaagaagagatgctgtcttggtcttgttggaggagcttgctttagttagatgtcttattattaaagttacctattattgttggaaataaactaatttgtatgggtttagatggtaacatggcattttgaatattggcttcctttcttgcaggcttgatttgcttggtgaccgaattactagtgactagtttactaactaggtcattcaaggaagtcaagttaacttaaacatgtcacctaaatgcacttgatggtgttgaaatgtccaccttcttaaatttttaagatgaacttagttctaaagaagataacaggccaatcctgaaggtactccctgtttgctgcagaatgtcagatattttggatgttgcataagagtcctatttgccccagttaattcaactttcgtctgcctgttttgtggactggctggctctgttagaactctgtccaaaaagtgcatggaatataacttgtaaagcttcccacaattgacaatatatatgcatgtgtttaaaccaaatccagaaagcttaaacaatagagctgcataatagtatttattaaagaatcaccaactgtaaacatgagaataacttaaggttctagtttagttttttgtaattgcaaattatatttttgctgctgatatattagaataattttaaaatgtcatcttgaaatagaaatatgtattttaagcactcacgcaaaggtaaatgaacacgttttaaatgtgtgtgttgctaattttttccataagaattgtaaacattgaactgaacaaattacctataatggatttggttaatgacttatgagcaagctggtttggccagacagtatacccaaacttttatataatatacagaaggctatcacacttgtgaaattctcttgtctaatctgaatttgcattccatggtgttaacatggtatatgtattgttattaaagtaagtgacccatgaaaaaaaaaaaaaaaaaaaa

SEQ ID NO: 922 - DNA, 416 bp, Artificial Sequence
  Description of Artificial sequences:primer
  misc_feature (1)..(416): 3' terminal sequence from clone image:363273.
  misc_feature (95)..(95): n is a, c, g, or t
  misc_feature (123)..(123): n is a, c, g, or t
  misc_feature (241)..(241): n is a, c, g, or t
  misc_feature (264)..(267): n is a, c, g, or t
  misc_feature (280)..(280): n is a, c, g, or t
  misc_feature (286)..(286): n is a, c, g, or t
  misc_feature (338)..(338): n is a, c, g, or t
  misc_feature (354)..(354): n is a, c, g, or t
  misc_feature (375)..(375): n is a, c, g, or t
  misc_feature (381)..(381): n is a, c, g, or t
  misc_feature (403)..(403): n is a, c, g, or t
tacgtcgcccgggagcggcagcgccgtcagcgctcttatctgcgcgcgcccgggttcagtttcccggagacctgagggacggaggccagccccgngcccacagcggcctggggccagggaggncgggtcctggcgcggggtcaccgctggggaccgtcgcccgggccgtgagactggacgcccgcagatccgggcgggttggggccctctgacgtcccccgaggtggggcacgggggcggncgggtcccgcttgcggcttggannnnccgggcgcgggancgaagngtcctgagcgcacccctcgcagcccttgtccagccttggacggcgaaccttngcgggccgataattangcgctcaatagcatgacggangcgganagcaagcagctcatcgaggacnatttcctcttcga

SEQ ID NO: 923 - DNA, 209 bp, Artificial Sequence
  Description of Artificial sequences:primer
  misc_feature (1)..(209): 5' terminal sequence from clone image:363273.
  misc_feature (9)..(9): n is a, c, g, or t
  misc_feature (22)..(22): n is a, c, g, or t
  misc_feature (52)..(53): n is a, c, g, or t
  misc_feature (68)..(69): n is a, c, g, or t
  misc_feature (99)..(99): n is a, c, g, or t
  misc_feature (113)..(113): n is a, c, g, or t
  misc_feature (131)..(131): n is a, c, g, or t
  misc_feature (137)..(137): n is a, c, g, or t
  misc_feature (150)..(150): n is a, c, g, or t
  misc_feature (157)..(158): n is a, c, g, or t
  misc_feature (161)..(161): n is a, c, g, or t
  misc_feature (168)..(168): n is a, c, g, or t
  misc_feature (170)..(170): n is a, c, g, or t
  misc_feature (174)..(174): n is a, c, g, or t
  misc_feature (186)..(186): n is a, c, g, or t
  misc_feature (200)..(200): n is a, c, g, or t
  misc_feature (207)..(207): n is a, c, g, or t
caggccaanaccctacgtttanttcagcatcagcagtatcttagccatcaannaaataaactctaccnngggtgacggaagctctacagcaaggctaanggctcgccagacgngaacgatcaggggtgcanggtggncactgccaggcantaagttnngangcagcangntggngtcgggtgtggnccgggcttcatttntgggcangc

SEQ ID NO: 924 - DNA, 316 bp, Artificial Sequence
  Description of Artificial sequences:primer
  misc_feature (1)..(316): 3' terminal sequence from clone image:363991. adducin 1 (alpha)(ADD1) gene.
  misc_feature (106)..(106): n is a, c, g, or t
  misc_feature (243)..(243): n is a, c, g, or t
gcgaccgctcaggagcacggaggcttctcaccaactgcgtcaggaaaacaccaggaccacctggggaagataaaactttttttctttaaataaatctataaagtanaacactgttacaaggggaaaagaaagccccactttatgtatttggttgcccatagttttaggagcatctaatctaatttcaactgaactcctaatgaactagtcatgcacagatgagtctgcttcagcccccccttngggtctcctccatttccaaggggcttctggaaaatgggggcctcttctacatacagttttaaaagcagagccc

SEQ ID NO: 925 - DNA, 376 bp, Artificial Sequence
  Description of Artificial sequences:primer
  misc_feature (1)..(376): 5' terminal sequence from clone image:363991. adducin 1 (alpha)(ADD1) gene.
  misc_feature (118)..(118): n is a, c, g, or t
  misc_feature (126)..(129): n is a, c, g, or t
  misc_feature (309)..(309): n is a, c, g, or t
  misc_feature (333)..(333): n is a, c, g, or t
tggtgaacacatttgcttctgtggggtgtaaaattaggagtggaattactgagtcatagggtatgcatgtgttcaacttttgtggatgtttccacatgattttccaaagtgaaacccngttttgannnnctggaatattgactgtctttcactctccttggaccctagggctacagaactggctacccttatcgataccctgctctgagagagaagtctaaaaaatacagcgatgtggaggttcctgctagtgtcacaggttactcctttgctagtgacggtgattcagggcacttgctccccactcanacacagttttcagaagcagcagcngggagaagacaagatggctgaactctggccggggcgacgaagc

SEQ ID NO: 926 - DNA, 430 bp, Artificial Sequence
  Description of Artificial sequences:primer
  misc_feature (1)..(430): 3' terminal sequence from clone image:364012. laminin, beta 1(LAMB1) gene.
  misc_feature (328)..(328): n is a, c, g, or t
tactgtcagaaaaaattttacatcaatctcagcttagatcatcagaagtactgaaagaatgaagtgaatatatgaaatgtagcaaagactaaagttagatacttcatgtaacttttcctgaaatattctttttagtaattacttcttttgggtctagagcaaaatggcacagcagacttttaaatcttcctccaaacttgtactcatagtaattccatttcttaaactaatgtcttgctggaaaattgacatgcttttagattgagtctgaaacagcagcttctgaggaaaccttgttcaacgcgtcccagcgcatcagcgagtttangagaggaatgtggaagaacttaagcggaaagctgcccaaaactccggggaggcagaatatattgaaaaagtagtatatactgtgaagcaaagtgcagaagat

SEQ ID NO: 927 - DNA, 470 bp, Artificial Sequence
  Description of Artificial sequences:primer
  misc_feature (1)..(470): 5' terminal sequence from clone image:364012. laminin, beta 1(LAMB1) gene.
attgcaaattacatagagaagcgcagatttttcaaaagtagattagacattagagaagcccatattgaagaagtggaggctctttggatcttgactaaattaggatttgtgaagacttgcttataaggaaatcagaggaaaaagattaaacaaaagatacaggaaggaaaggtgagattgtagcatatgcaagaagtgagtgaggagaagagaaatggggtgtggggttggaatgcaaatgattctttttagaaactgttcaaatagccatttatggaaatttcatttcaagagattttgttcctttctcttgtgataaaatgtcattatgcaaaatgccctgaagcagagtacttgagaaatttgtgtcctcagtactgcaggaaaccacacaaacccaaaacagaaaagacagctgtctgatattgtggcagtgaacttttctcattggttttgttctccttccccac

SEQ ID NO: 928 - DNA, 5831 bp, Artificial Sequence
  Description of Artificial sequences:primer
  misc_feature (1)..(5831): laminin, beta 1(LAMB1) gene.
gggacctggaagcgccccagccccgcagcgatcgcagattcggctttcaaacaaaagaggcgccccggggggtgggaccgggacctcacccggtcctcgcagagttgcggccgcccgccccttcagccccggctctccgtatgcgcatgagcagaggcgcctccctctgttcctcccaaggctaaactttctaattcccttctttgggctcgggggctcccggagcagggcgagagctcgcgtcgccggaaaggaagacgggaagaaagggcaggcggctcggcgggcgtcttctccactcctctgccgcgtccccgtggctgcagggagccggcatggggcttctccagttgctagctttcagtttcttagccctgtgcagagcccgagtgcgcgctcaggaacccgagttcagctacggctgcgcagaaggcagctgctatcccgccacgggcgaccttctcatcggccgagcacagaagctttcggtgacctcgacgtgcgggctgcacaagcccgaaccctactgtatcgtcagccacttgcaggaggacaaaaaatgcttcatatgcaattcccaagatccttatcatgagaccctgaatcctgacagccatctcattgaaaatgtggtcactacatttgctccaaaccgccttaagatttggtggcaatctgaaaatggtgtggaaaatgtaactatccaactggatttggaagcagaattccattttactcatctcataatgactttcaagacattccgtccagctgctatgctgatagaacgatcgtccgactttgggaaaacctggggtgtgtatagatacttcgcctatgactgtgaggcctcgtttccaggcatttcaactggccccatgaaaaaagtcgatgacataatttgtgattctcgatattctgacattgaaccctcaactgaaggagaggtgatatttcgtgctttagatcctgctttcaaaatagaagatccttatagcccaaggatacagaatttattaaaaattaccaacttgagaatcaagtttgtgaaactgcatactttgggagataaccttctggattccaggatggaaatcagagaaaagtattattatgcagtttatgatatggtggttcgaggaaattgcttctgctatggtcatgccagcgaatgtgcccctgtggatggattcaatgaagaagtggaaggaatggttcacggacactgcatgtgcaggcataacaccaagggcttaaactgtgaactctgcatggatttctaccatgatttaccttggagacctgctgaaggccgaaacagcaacgcctgtaaaaaatgtaactgcaatgaacattccatctcttgtcactttgacatggctgtttacctggccacggggaacgtcagcggaggcgtgtgtgatgactgtcagcacaacaccatggggcgcaactgtgagcagtgcaagccgttttactaccagcacccagagagggacatccgagatcctaatttctgtgaacgatgtacgtgtgacccagctggctctcaaaatgagggaatttgtgacagctatactgatttttctactggtctcattgctggccagtgtcggtgtaaattaaatgtggaaggagaacattgtgatgtttgcaaagaaggcttctatgatttaagcagtgaagatccatttggttgtaaatcttgtgcttgcaatcctctgggaacaattcctggagggaatccttgtgattccgagacaggtcactgctactgcaagcgtctggtgacaggacagcattgtgaccagtgcctgccagagcactggggcttaagcaatgatttggatggatgtcgaccatgtgactgtgaccttgggggagccttaaacaacagttgctttgcggagtcaggccagtgctcatgccggcctcacatgattggacgtcagtgcaacgaagtggaacctggttactactttgccaccctggatcactacctctatgaagcggaggaagccaacttggggcctggggttagcatagtggagcggcaatatatccaggaccggattccctcctggactggagccggcttcgtccgagtgcctgaaggggcttatttggagtttttcattgacaacataccatattccatggagtacgacatcctaattcgctacgagccacagctacccgaccactgggaaaaagctgtcatcacagtgcagcgacctggaaggattccaaccagcagccgatgtggtaataccatccccgatgatgacaaccaggtggtgtcattatcaccaggctcaagatatgtcgtccttcctcggccggtgtgctttgagaagggaacaaactacacggtgaggttggagctgcctcagtacacctcctctgatagcgacgtggagagcccctacacgctgatcgattctcttgttctcatgccatactgtaaatcactggacatcttcaccgtgggaggttcaggagatggggtggtcaccaacagtgcctgggaaacctttcagagataccgatgtctagagaacagcagaagcgttgtgaaaacaccgatgacagatgtttgcagaaacatcatctttagcatttctgccctgttacaccagacaggcctggcttgtgaatgcgaccctcagggttcgttaagttccgtgtgtgatcccaacggaggccagtgccagtgccggcccaacgtggttggaagaacctgcaacagatgtgcacctggaacttttggctttggccccagtggatgcaaaccttgtgagtgccatctgcaaggatctgtcaatgccttctgcaatcccgtcactggccagtgccactgtttccagggagtgtatgctcggcagtgtgatcggtgcttacctgggcactggggctttccaagttgccagccctgccagtgcaatggccacgccgatgactgcgacccagtgactggggagtgcttgaactgccaggactacaccatgggtcataactgtgaaaggtgcttggctggttactatggcgaccccatcattgggtcaggtgatcactgccgcccttgcccttgcccagatggtcccgacagtggacgccagtttgccaggagctgctaccaagatcctgttactttacagcttgcctgtgtttgtgatcctggatacattggttccagatgtgacgactgtgcctcaggatactttggcaatccatcagaagttggggggtcgtgtcagccttgccagtgtcacaacaacattgacacgacagacccagaagcctgtgacaaggagactgggaggtgtctcaagtgcctgtaccacacggaaggggaacactgtcagttctgccggtttggatactatggtgatgccctccggcaggactgtcgaaagtgtgtctgtaattacctgggcaccgtgcaagagcactgtaacggctctgactgccagtgcgacaaagccactggtcagtgcttgtgtcttcctaatgtgatcgggcagaactgtgaccgctgtgcgcccaatacctggcagctggccagtggcactggctgtgacccatgcaactgcaatgctgctcattccttcgggccatcttgcaatgagttcacggggcagtgccagtgcatgcctgggtttggaggccgcacctgcagcgagtgccaggaactcttctggggagaccccgacgtggagtgccgagcctgtgactgtgaccccaggggcattgagacgccacagtgtgaccagtccacgggccagtgtgtctgcgttgagggtgttgagggtccacgctgtgacaagtgcacgcgagggtactcgggggtcttccctgactgcacaccctgccaccagtgctttgctctctgggatgtgatcattgccgagctgaccaacaggacacacagattcctggagaaagccaaggccttgaagatcagtggtgtgatcgggccttaccgtgagactgtggactcggtggagaggaaagtcagcgagataaaagacatcctggcgcagagccccgcagcagagccactgaaaaacattgggaatctctttgaggaagcagagaaactgattaaagatgttacagaaatgatggctcaagtagaagtgaaattatctgacacaacttcccaaagcaacagcacagccaaagaactggattctctacagacagaagccgaaagcctagacaacactgtgaaagaacttgctgaacaactggaatttatcaaaaactcagatattcggggtgccttggatagcattaccaagtatttccagatgtctcttgaggcagaggagagggtgaatgcctccaccacagaacccaacagcactgtggagcagtcagccctcatgagagacagagtagaagacgtgatgatggagcgagaatcccagttcaaggaaaaacaagaggagcaggctcgcctccttgatgaactggcaggcaagctacaaagcctagacctttcagccgctgccgaaatgacctgtggaacacccccaggggcctcctgttccgagactgaatgtggcgggccaaactgcagaactgacgaaggagagaggaagtgtggggggcctggctgtggtggtctggttactgttgcacacaacgcctggcagaaagccatggacttggaccaagatgtcctgagtgccctggctgaagtggaacagctctccaagatggtctctgaagcaaaactgagggcagatgaggcaaaacaaagtgctgaagacattctgttgaagacaaatgctaccaaagaaaaaatggacaagagcaatgaggagctgagaaatctaatcaagcaaatcagaaactttttgacccaggatagtgctgatttggacagcattgaagcagttgctaatgaagtattgaaaatggagatgcctagcaccccacagcagttacagaacttgacagaagatatacgtgaacgagttgaaagcctttctcaagtagaggttattcttcagcatagtgctgctgacattgccagagctgagatgttgttagaagaagctaaaagagcaagcaaaagtgcaacagatgttaaagtcactgcagatatggtaaaggaagctctggaagaagcagaaaaggcccaggtcgcagcagagaaggcaattaaacaagcagatgaagacattcaaggaacccagaacctgttaacttcgattgagtctgaaacagcagcttctgaggaaaccttgttcaacgcgtcccagcgcatcagcgagttagagaggaatgtggaagaacttaagcggaaagctgcccaaaactccggggaggcagaatatattgaaaaagtagtatatactgtgaagcaaagtgcagaagatgttaagaagactttagatggtgaacttgatgaaaagtataaaaaagtagaaaatttaattgccaaaaaaactgaagagtcagctgatgccagaaggaaagccgaaatgctacaaaatgaagcaaaaactcttttagctcaagcaaatagcaagctgcaactgctcaaagatttagaaagaaaatatgaagacaatcaaagatacttagaagataaagctcaagaattagcaagactggaaggagaagtccgttcactcctaaaggatataagccagaaagttgctgtgtatagcacatgcttgtaacagaggagaataaaaaatggctgaggtgaacaaggtaaaacaactacattttaaaaactgacttaatgctcttcaaaataaaacatcacctatttaatgtttttaatcacattttgtatgagttaaataaagccc

SEQ ID NO: 929 - DNA, 384 bp, Artificial Sequence
  Description of Artificial sequences:primer
  misc_feature (1)..(384): 3' terminal sequence from clone image:364687. cd5 antigen (p56-62)(CD5) gene.
cctcaactaaactctttatttttggtttggtttttaagtaggccatggttgctttgaggccactgtatggtggcaaactatagatgaaagagcttttattaaaaaaggcactgatgggagacactggctgcccccgaacctttgccctccctaagagcagcctctcagttcccttttgaggagccccctcacctccaccagatatgggaagacaaatggggtccctgtttctggattcccagcatggtcgggggaagatctgtgacctgggcttggcacgggggctctcagaaggcaaggctggttggagggtgttggtgggggcagaaagctgagcagattctggggagcagcccaccccatatcctagtaactccccttttt

SEQ ID NO: 930 - DNA, 535 bp, Artificial Sequence
  Description of Artificial sequences:primer
  misc_feature (1)..(535): 5' terminal sequence from clone image:364687. cd5 antigen (p56-62)(CD5) gene.
  misc_feature (138)..(138): n is a, c, g, or t
catgactcctctagtacttggagatcttggacgtacacctaatcccatggggcctcggcttccttaactgcaagtgagaagaggaggtctacccaggagcctcgggtctgatcaagggagaggccaggcgcagtcacntgcggcggctccctaagaaggtgaagcaacatgggaacacatcctaagacaggtcctttctccacgccatttgatgctgtatctcctgggagcacaggcatcaatggtccaagccgcataataagtctggaagaagcaaaagggagttactaggatatggggtgggctgctcccagaatctgctcagctttctgcccccaccaacaccctccaaccaggccttgccttctgagagccccgtggccaagcccaggtcacagatcttcccccgaccatgctgggaatccagaaacagggaccccatttgtcttcccatatctggtggaggtgagggggctcctcaaaaagggaactgagaagctgctcttagggagggcaaaggttcgggggcagccaa

SEQ ID NO: 931 - DNA, 3151 bp, Artificial Sequence
  Description of Artificial sequences:primer
  misc_feature (1)..(3151): cd5 antigen (p56-62)(CD5) gene.
cccggccagacaccctcacctgcggtgcccagctgcccaggctgaggcaagagaaggccagaaaccatgcccatggggtctctgcaaccgctggccaccttgtacctgctggggatgctggtcgcttcctgcctcggacggctcagctggtatgacccagatttccaggcaaggctcacccgttccaactcgaagtgccagggccagctggaggtctacctcaaggacggatggcacatggtttgcagccagagctggggccggagctccaagcagtgggaggaccccagtcaagcgtcaaaagtctgccagcggctgaactgtggggtgcccttaagccttggccccttccttgtcacctacacacctcagagctcaatcatctgctacggacaactgggctccttctccaactgcagccacagcagaaatgacatgtgtcactctctgggcctgacctgcttagaaccccagaagacaacacctccaacgacaaggcccccgcccaccacaactccagagcccacagctcctcccaggctgcagctggtggcacagtctggcggccagcactgtgccggcgtggtggagttctacagcggcagcctggggggtaccatcagctatgaggcccaggacaagacccaggacctggagaacttcctctgcaacaacctccagtgtggctccttcttgaagcatctgccagagactgaggcaggcagagcccaagacccaggggagccacgggaacaccagcccttgccaatccaatggaagatccagaactcaagctgtacctccctggagcattgcttcaggaaaatcaagccccagaaaagtggccgagttcttgccctcctttgctcaggtttccagcccaaggtgcagagccgtctggtggggggcagcagcatctgtgaaggcaccgtggaggtgcgccagggggctcagtgggcagccctgtgtgacagctcttcagccaggagctcgctgcggtgggaggaggtgtgccgggagcagcagtgtggcagcgtcaactcctatcgagtgctggacgctggtgacccaacatcccgggggctcttctgtccccatcagaagctgtcccagtgccacgaactttgggagagaaattcctactgcaagaaggtgtttgtcacatgccaggatccaaaccccgcaggcctggccgcaggcacggtggcaagcatcatcctggccctggtgctcctggtggtgctgctggtcgtgtgcggcccccttgcctacaagaagctagtgaagaaattccgccagaagaagcagcgccagtggattggcccaacgggaatgaaccaaaacatgtctttccatcgcaaccacacggcaaccgtccgatcccatgctgagaaccccacagcctcccacgtggataacgaatacagccaacctcccaggaactcccgcctgtcagcttatccagctctggaaggggttctgcatcgctcctccatgcagcctgacaactcctccgacagtgactatgatctgcatggggctcagaggctgtaaagaactgggatccatgagcaaaaagccgagagccagacctgtttgtcctgagaaaactgtccgctcttcacttgaaatcatgtccctatttctaccccggccagaacatggacagaggccagaagccttccggacaggcgctgctgccccgagtggcaggccagctcacactctgctgcacaacagctcggccgcccctccacttgtggaagctgtggtgggcagagccccaaaacaagcagccttccaactagagactcgggggtgtctgaagggggccccctttccctgcccgctggggagcggcgtctcagtgaaatcggctttctcctcagactctgtccctggtaaggagtgacaaggaagctcacagctgggcgagtgcattttgaatagttttttgtaagtagtgcttttcctccttcctgacaaatcgagcgctttggcctcttctgtgcagcatccacccctgcggatccctctggggaggacaggaaggggactcccggagacctctgcagccgtggtggtcagaggctgctcatctgagcacaaagacagctctgcacattcaccgcagctgccagccaggggtctgggtgggcaccaccctgacccacagcgtcaccccactccctctgtcttatgactcccctccccaaccccctcatctaaagacaccttcctttccactggctgtcaagcccacagggcaccagtgccacccagggccctgcacaaaggggcgcctagtaaaccttaaccaacttggttttttgcttcacccagcaattaaaagtcccaagctgaggtagtttcagtccatcacagttcatcttctaacccaagagtcagagatggggctggtcatgttcctttggtttgaataactcccttgacgaaaacagactcctctagtacttggagatcttggacgtacacctaatcccatggggcctcggcttccttaactgcaagtgagaagaggaggtctacccaggagcctcgggtctgatcaagggagaggccaggcgcagctcactgcggcctctaagaaggtgaagcaacatgggaacacatcctaagacacatcctaagacaggtcctttctccacgccatttgatgctgtatctcctgggagcacaggcatcaatggtccaagccgcataataagtctggaagagcaaaagggagttactaggatatggggtgggctgctcccagaatctgctcagctttctgcccccaccaacaccctccaaccaggccttgccttctgagagcccccgtggccaagcccaggtcacagatcttcccccgaccatgctgggaatccagaaacagggaccccatttgtcttcccatatctggtggaggtgagggggctcctcaaaagggaactgagaggctgctcttagggagggcaaaggttcgggggcagccagtgtctcccatcagtgccttttttaataaaagctctttcatctatagtttggccaccatacagtggcctcaaagcaaccatggcctacttaaaaaccaaaccaaaaataaagagtttagttgaggagaaaaaaaaaaaaaaaaaaaaaaaaa

SEQ ID NO: 932 - DNA, 339 bp, Artificial Sequence
  Description of Artificial sequences:primer
  misc_feature (1)..(339): 3' terminal sequence from clone image:36607. ubiquinol-cytochrome c reductase (6.4kd) subunit(UQCR) gene.
  misc_feature (50)..(50): n is a, c, g, or t
  misc_feature (68)..(68): n is a, c, g, or t
  misc_feature (138)..(138): n is a, c, g, or t
  misc_feature (255)..(255): n is a, c, g, or t
ttttttttttttttttttatcagagacaggggcctctttgttgcccaggntagtactgaactcctggntcaagtgatgccccttcctcagcctcccaaagtgttgggattgtaggctgagccaccactcccagcctgntcatttttgtatccctaatgtgacagtttgaaatgtctaccaattctgatattcttcccttcaaaacacagaacctcattctcctccctctggcacgtgggctgggcctgggggggnttgcttttgataaacaggctgtggcgggaagtgatcacgtgagacttcttcagggtgggctcatagaaggcactgtgggcttgc

SEQ ID NO: 933 - DNA, 425 bp, Artificial Sequence
  Description of Artificial sequences:primer
  misc_feature (1)..(425): 5' terminal sequence from clone image:36607. ubiquinol-cytochrome c reductase (6.4kd) subunit(UQCR) gene.
  misc_feature (97)..(97): n is a, c, g, or t
  misc_feature (99)..(99): n is a, c, g, or t
  misc_feature (101)..(101): n is a, c, g, or t
  misc_feature (320)..(320): n is a, c, g, or t
  misc_feature (342)..(342): n is a, c, g, or t
  misc_feature (383)..(383): n is a, c, g, or t
  misc_feature (409)..(409): n is a, c, g, or t
actccgccgcgatggtgacccggttcctgggcccacgctaccgggagctggtcaagaactgggtcccgacggcctacacatggggcgctgtgggcgntngngggctggtgtgggccaccgattggcggctgatcctggactgggtaccttacatcaatggcaagtttaagaaggataattaattacacaaacccttcacagactgctctggtgcctgggtggtgctagctcctcccacctcagcacctgctgcatctgggagcagcccaagccttcaggatgggacaagagggaaacccacagctcagctttcaggcttntttatgttttctggaaaacagnttgggatatttttaattgcacgtttgcatttaaaccttcanttgaaacctggttccgttgcccggangtttgatcatgctggg

SEQ ID NO: 934 - DNA, 1305 bp, Artificial Sequence
  Description of Artificial sequences:primer
  misc_feature (1)..(1305): ubiquinol-cytochrome c reductase (6.4kd) subunit(UQCR) gene.
cctgagggtgcgactccgccgcgatggtgacccggttcctgggcccacgctaccgggagctggtcaagaactgggtcccgacggcctacacatggggcgctgtgggcgccgtggggctggtgtgggccaccgattggcggctgatcctggactgggtaccttacatcaatggcaagtttaagaaggataattaattacacaaacccttcacagactgctctggtgcctggtggtgctagctcctcccacctcagcacctgctgcatctggagcagcccaagcctcaggatggacaagaggaaacccacagctcagcttcaggcttcttatgtttctgaaaacagcttggatattttaatgcacgttgcattaaacctcactgaaacctgctccgtgcccggatgttgatcatgctggtggcttggttactgtgactgtagctggagtggcacaggtgacccaggcgtcctttcagctccagaatgttgcaagtctaggagagtgttccaatggctgacagaaactgcctatttgaaatggctcataagtagtatctgcagtgtgttcatccgttgctgccttaacaagtcacccacacgtagtggcttaaagcaacgaacattcactctctcacagtctgtgtcagtcggggatttgggagtgatgtatctgggtggttgtggcccagagtctctcatgaggttgcagttaagacatcagccaaggccacttcgtctgaggaaggctcaactggggctggagccacttccaagccagtgccctcacgtggctgtcggtgacagccacagttccttcccatgggggcccctacacgaagctgcttgagcatcctcacggcatggcctctgccttccccagagcaggtgaaccaagggagaggaaggagcaagccacagtgcttctatgagccaccctgagaagtctcacgtgatcacttccgccacagcctgtttatcaaaagcaagccccccaggcccagcccacgtgcagagggaggagaatgaggttctgtgttttgaagggaagaatatcagaattggtagacatttcaaactgtcacattagggatacaaaaatgaacaggctgggagtggtggctcagcctacaatcccaacactttgggaggctgaggaaggggcatcacttgaaccaggagttcagtactaacctgggcaacaaagaggcccctgtctctgataaaaagaaaaaaaatgaaaaaataaaaatgaacaggtataaaaagaaaaaaaaaaaaaaaaaaaaaaaaaaaaaaaaaaaaaaaa

SEQ ID NO: 935 - DNA, 305 bp, Artificial Sequence
  Description of Artificial sequences:primer
  misc_feature (1)..(305): 3' terminal sequence from clone image:36684. rap2a, member of ras oncogene family(RAP2A) gene.
  misc_feature (146)..(146): n is a, c, g, or t
  misc_feature (159)..(159): n is a, c, g, or t
  misc_feature (181)..(181): n is a, c, g, or t
  misc_feature (183)..(183): n is a, c, g, or t
  misc_feature (192)..(192): n is a, c, g, or t
  misc_feature (207)..(207): n is a, c, g, or t
  misc_feature (232)..(232): n is a, c, g, or t
  misc_feature (286)..(286): n is a, c, g, or t
ttttttttttttttttcattaaataaatttatttgttaaaataatttaactccaaatacaactgttgaatttgcattgagttataactacaattcatgttttaattgaaatgtcaaggtttaacaactgacattgttacaaaacantaaacttgttcanttttaaatggtcagttgtattngngcgcaacanttaactgtggaactntatctctggggaaacctcaaatcantaatggataagtctgtttccaaaacccactgcagtcattcttggaaaccctggntcaggatttaataggatgg

SEQ ID NO: 936 - DNA, 418 bp, Artificial Sequence
  Description of Artificial sequences:primer
  misc_feature (1)..(418): 5' terminal sequence from clone image:36684. rap2a, member of ras oncogene family(RAP2A) gene.
  misc_feature (380)..(380): n is a, c, g, or t
  misc_feature (385)..(385): n is a, c, g, or t
  misc_feature (393)..(393): n is a, c, g, or t
  misc_feature (403)..(403): n is a, c, g, or t
aaatagaaatatctataaagattccacagtttgacattatggcttgctatgcagatgtgaaaataggttaaataatatgaaagatatggcagaatgtaaagtggaaaagatgacctaaaattttgagttgtattaatagttaaaaacatttgtgtcagatgacagggtgggcttttactgtcaagacatgaataagaactgatctggctgcctgatgagtgtttccacgcagccctgcatatttagtgaccaaggcatcaaggacatcccgaaactgggaaattcatatccatctggtatggaatatattaactcaggctgggcaaatggaatgtgtttgttggaggatatttacagtaattaaaacactttaaggaacnggganggtttacntttgtttggncttacggaaaccctt

SEQ ID NO: 937 - DNA, 4375 bp, Artificial Sequence
  Description of Artificial sequences:primer
  misc_feature (1)..(4375): rap2a, member of ras oncogene family(RAP2A) gene.
agcggggtcgccctcagtcccacccggtgcctacggggccgcatcgccgcccggctcggcccggcccatgcccagggccgctgctccctcagttgccgccgccgccgccggcgcccagggggccgccgcggctgtgaggtgggggcggcagcgggaggcggcggggcgggccgccggggccggggctgggggcgcagcgcggccggcgtaggtctatgtcgcgggcggcggcggcggcggcggccgcggagggacgatgcgcgagtacaaagtggtggtgctgggctcgggcggggtaggcaaatccgccctgaccgtgcagttcgtgaccggcaccttcatcgagaaatacgaccccaccatcgaggacttctaccgcaaggagatcgaggtggattcgtcgccgtcggtgctggagatcctggacacggcgggcaccgagcagttcgcgtccatgcgggacctgtacatcaagaacggccagggcttcatcctcgtctacagcctcgtcaaccagcagagcttccaggacatcaagcccatgcgggaccagatcatccgcgtgaagcggtatgagaaagtgccagtcatcttggttgggaacaaagtggacctggaaagtgagagagaagtatcgtccagcgaaggcagagcccttgctgaagagtggggctgcccctttatggaaacttccgctaagagtaaaacaatggtggacgaactctttgcagaaattgtgaggcagatgaactatgctgctcagcctgacaaagatgacccatgctgttctgcatgtaacatacaatagcatccaaatatggctgtcctggatgggatttgcccaatgtcgtaggtgatagaaaactcgcctactccactgcagaacttgcagaatgcgtggtgttaatctacagagaactgcagcccttattcagaattgagcagtgattgtcagttgatatctctgagtaacatttgggttcagtaactacagttttcaccatttgtcctcagtctcctttatgcatctgcaactttaaggcatagtccatcgatctacagggtgatctcatttgaaagctatgatggcattgtcgctgagttgacagaagcaactattgtacaaattaaaaataaccataagggagaaaccagaagaattcctctgaccacttacaattaaaatattttgtcttctttaaaaaaataagtaaaggagaaatattttcctacaagagtactgaatttcaggaaatgggatagagcttctaaccagtgtattccgtcaagtaagataataacagctgacctgccaacagcattacagggagattctttgctcagctaacacatttctgtttttcaaaattgatgcttaattgtagctgttattctaatttgtgacatggaactaactcatgcttcaatccttgatagagcaaaactcagaacaggttatgtaaaaatatagtctggctttagaatttgttaattcacctgctttgccacagaaaatggaggctttcacaagggtttgatcagaattaaaaccccaaaccagccctctgttaggggtggtctttataactttactgaacaagagggaagcaactgtgatgggaagagattacctagccttactaacaagaagcattctaatagataaactagtaccatcatgtaaggaagatgaagccatgttgcatccacatgttcccgtttgcagaaacctcacaggacagtacgaatatctggcatttttaagttcattaaagcagcaaattccttctcgcctttaagggctatggttgtagtgtgacccgtggctaacctgctttcaaaatcaagtatttgctgtagcagagctttattgcaggcattttaaaaattgaataaccatgtgaaataatttgggcttaaaagtgaacataaattatagagtggaaggtaagggacaaaagccttttacctttaattttcctggagaattatatataggttttcttagaacaattttaccctgattactgaagcgtcaaataaagctggagtgaaaattttgttttgaaaaggtgctcaagctctgacatttttggttttcatagtcgtgaagtatttatcatttgcatgactaatggcacaggaaaaacctattcataagttttacaatcaagtatagaggggtcttcagctaacttagttatacataaatgctgaaaagattatcttgagctgggccttgggagaagaatttggccttcagaactgcaatatcactgagcctgcgatctatacaccaccccacattttgttggtttcacagtcttgtgcaagtaacctctggtcttacgtgtgtaactgagagaagagtgtgtgtttgtgtgtgcatgtgtgtttattgttcctaagaatttggcacaagtcagagataattgcctatactaagaatctatactgcagaatatagtgtatcaaaaacttttttcttttaaattattaaagtgtcttttatacttttatgaaatcattggtagccccccaagtgtttaataactggcattaagcttagagggtgaaaaaaaaaaaaaaaagattgatagtatttttcataatgaaaaaactgaagagatacgtgaatgaaaccaggccatagctgtcataaatctttgacttttgaatatttacattcttcagtataattttttataatcctcaattatgaaccaccttgtttataggacaaaaaaatttaaccaattttattgaaacgaatttcactgtgtaaaagttggtttgattcaaacatgtagagaagttgtagattcaagatatatgatttctctatggaaataaaaatatttgttagtgaattggttgagttttgattcctctaacttctcagaatgattctttagaattctataattcatagcaatttttgacaagtaagattgcaaaatagaaatatctataaagattccacagtttgacattatggcttgctatgcagatgtgaaaataggttaaataatatgaaagatatggcagaatgtaaagtggaaaagatgacctaaaattttgagttgtattaatagttaaaaacatttgtgtcagatgacagggtgggcttttactgtcaagacatgaataagaactgatctggctgcctgatgagtgtttccacgcagccctgcatatttagtgaccaaggcatcaaggacatcccgaaactggaaattcatatccatctggtatgaatatataactcagctggcaaatgaatgtgtttgttgagatattacagtaataaaacacttaagaacaggaagattacatttgttggcatacgaaaccttagtggctacagaagaaagttgaccttgtgtcactatttattttatgccctgatcagactagcaacttagataagtgaaagtttttctaacatgccttaaaaatattatggtttgatccaaagacccactttttctttagctcttgtgataagattttgttttttttacttttatacaaaggcagcatctttgaatttttttttcttttgatgttgcaacttttgggttcttttaaactgtgatagtgatggtaactgatgcctttcattttgttcaacttacacaaaacaagccagcatctgatcaaaagtattacataaaatattttcttaaactattgaaaggtgctttgatgattttctcctttggtttgtagaattaggactgaacttttgactcaaattgctacagttgccatcacctttctgtggtaatactactgatatttgcttttctatataaagaaatgttgcctaaggctgtctggtatttcttttcaagggttttccagtatgaatgttaatgttgtcagtgtatgtatgaatatgaaagtgctttgttttgtttgttgctgttttttgtttatgtgtgtgtttttaatttttttgttcttatcagcagtcttgtgttagcactgggtaagctttaattgtcccttagccaatcaaacattaaggactatggaggtctttttttttttatttaacatgtcattgttcatctattaaatcttgatcagggtttcaagaatgactgcagtgggttttggaaacagacttatcattattgatttgaggtttcccagagatatagttcacagttaattgttgcgctctaatacaactgaccatttaaaattgaacaagtttattgttttgtaacaatgtcagttgttaaaccttgacatttcaattaaaacatgaattgtagttataactcaatgcaaattcaacagttgtatttggagttaaattattttaacaaataaatttatttaatgaagaaaaaaaaaaaaaaaa

SEQ ID NO: 938 - DNA, 311 bp, Artificial Sequence
  Description of Artificial sequences:primer
  misc_feature (1)..(311): 3' terminal sequence from clone image:36710. regulator of g-protein signalling 6(RGS6) gene.
tttttttttgcttctatgttttttgtttatatgctcccaagagagatttttttttttacctatgaccaaaaatagatcaaaggagggtagtcatagcaagtgggggagtgaatgtctggattcaaaacaggttacttaatacagctctgtctgtgggctcatgggtgtcacaataacaatgacaatgatgatagtattagctaccgtttgctaagcacctactgcgtatcagggcacctgactcggtgctttacatacattacctcacagccagggttggcaaatgggtcattttgacacacacacacagg

SEQ ID NO: 939 - DNA, 384 bp, Artificial Sequence
  Description of Artificial sequences:primer
  misc_feature (1)..(384): 5' terminal sequence from clone image:36710. regulator of g-protein signalling 6(RGS6) gene.
  misc_feature (296)..(296): n is a, c, g, or t
  misc_feature (322)..(322): n is a, c, g, or t
  misc_feature (359)..(359): n is a, c, g, or t
  misc_feature (374)..(374): n is a, c, g, or t
  misc_feature (379)..(379): n is a, c, g, or t
tgaagggcgatggtggggagactcggtgggtgaatggggagaccagaaagaaagagtccacagagcctgggctgggccggttggaggctcctgtttacagccctctcttctttgtacagttgtattccaacactccactcgctaagaggccctgatcccagctcattcaggggagaacacgtcgtgggggttcctgtcacgactatcacttgagattatattattatcctcactccctcgctgtctgggagacggtcacaccttctggcaaattcaaggaggcatgagttggaccnagagcacatccagcatttgcattacnttcctggggggaacttccataggttacaggccacttnaattcccaacggcgnttttnaatcc

SEQ ID NO: 940 - DNA, 3105 bp, Artificial Sequence
  Description of Artificial sequences:primer
  misc_feature (1)..(3105): regulator of g-protein signalling 6(RGS6) gene.
gactgtggaagcacgagcttacataagtggttaggcaagctggcgtgtggacttgtgtgggatgggtgcaggtctgcatataaatcatgttcctgggtttctgggtgtgaagcgcacaccgacggggacgagagcgcataggatggcgcttttagatacttccagtcttccgatgttgtgatcgcagtgtgagtgaagacactcaggatggctcaaggatccggggatcaaagagcagtgggggttgctgacccagaggagagttctccaaacatgatcgtttactgcaaaattgaagacatcattacaaagatgcaagatgacaagacagggggtgtgcccatcagaacagtcaagagctttctctccaaaatccccagtgtcgtcacaggtactgacattgtgcagtggcttatgaagaacctttccattgaggacccagttgaagcaatacacttggggagccttatcgctgcccagggctacatctttccaatctcagaccatgttctcaccatgaaggatgatggcaccttttatcgtttccaggctccgtacttctggccttcgaactgctgggaacctgaaaacactgactatgccatctatctctgtaagaggacaatgcaaaataaagcaaggctggaactggcagattatgaagcagaaaacttagcaagactccagagggcctttgcgaggaagtgggaattcatctttatgcaagcagaagcacaagtaaagattgaccggaaaaaagacaagacagaaaggaaaattttggatagtcaagaacgagccttttgggatgtccacaggcctgtgccaggctgtgtgaacacaacagaaatggatatccgaaaatgtcgacgtttgaagaatccacaaaaggttaaaaagtccgtgtatggcgtgactgaagagtcccaggcacagagcccggtgcatgtactcagccaaccaatcaggaaaacaacaaaagaggacatccggaaacagataacatttttgaacgcacagatcgacagacattgtttgaaaatgtccaaagtggctgaaagtttaattgcctacacggaacaatatgtggaatatgaccctttgataacaccagctgagccatccaacccttggatcagcgatgacgttgctttgtgggacatagagatgagcaaagagcccagccaacagcgagtaaaaagatggggcttctctttcgatgagatattgaaggaccaggtggggcgggaccagtttctacgattcctggagtccgaattcagttcagaaaacctcaggttctggctggctgtccaagatcttaagaaacaacccctacaggatgtggccaagagggtagaagaaatctggcaagagtttctggctccaggggctccaagtgcaatcaacctggattctcacagctatgagataaccagtcaaaatgtcaaagatggagggagatatacatttgaagacgcccaggagcacatctacaagctgatgaagagtgacagctatgcccgcttcctccggtcaaatgcttaccaggatttgctgctggccaagaagaagggaaagtcgctggcgggcaagcgcctcacgggcctgatgcagtcctcctgaccgttcctaccgcaggtccagggcctgggcccgcggaccccacaggcaggcggcggcgctccacatctgcggacagagtttccttacgaggagacttggtcactgtgaaggagaaagagtgagggcaatgaagggcgatggtggggagactcggtgggtgaatggggagaccagaaagaaagagtccacagagcctgggctgggcccggtggaggctcctgtttacagccctctcttctttgtacagttgtattccaacactccactcgctaagaggccctgatcccagctcattcaggggagaacacgtcgtggggttcctgtcacgactatcacttgagattatattattatcctcactccctcgctgtctggagacggtcacaccttctggcaaattcaagaggcatgagtggaccgagagcacatccagcatttgcatcacctccctggcacctcccatagttacagccactacatccccaccgccgcctgtcatccctcacgtctctgtggccacccgggtgtcactgccagcaccaggcactgctttcacgtaaaatgtccaaatcacatcttcagcaagaaagcaacctcacggattgccccgcctcaaggtctttccaccctctttgagatcagcgttcggagaggtccccgccagcccggtggctgccctcaggtcccgtcacatgtctcaagggtccagcgttcgaggaagcactgttgtagatgacagagctttttgtttcacagctgcggggattctgctgaccatcttttagaaaattatttcataatttattctggctttgcccccttgctccttggtttattccctcatgttttactcaaaataaacatggccatgaactcaggggccattgggattctcccctctggcagccccaggtgggagctgggagggtccccagcccaggaggtggctggattgcagggctggcagcccccacgtggtggcatcctgacaggcacagtgagacccttgctgggtcaggtctcctttgtgtgtgaagctggggcagagtatgctacgaagggaccaggccaggccacagggctctcctcccagtctttatctgaaggcccagccaaagcacccctctaaaccggtcacctaggggaaatgcaaaaacctgcaaaagatccacctgtattccctgtgtgtgtgtgtcaaaatgaccatttgccaacctggctgtgaggtaatgtatgtaaagcaccgagtcaggtgcctgatacgcagtaggtgcttagcaaacggtagctaatactatcatcattgtcattgttattgtgacacccatgagcccacagacagagctgtattaagtaacctgttttgaatccagacattcactcccccacttgctatgactaccctcctttgatctatttttggtcataggtaaaaaaaaaaatctctcttgggagcatataaacaaaaaacatagaagc

SEQ ID NO: 941 - DNA, 432 bp, Artificial Sequence
  Description of Artificial sequences:primer
  misc_feature (1)..(432): 3' terminal sequence from clone image:36844. interleukin 1 receptor antagonist(IL1RN) gene.
  misc_feature (176)..(176): n is a, c, g, or t
  misc_feature (198)..(198): n is a, c, g, or t
  misc_feature (391)..(391): n is a, c, g, or t
  misc_feature (416)..(416): n is a, c, g, or t
tttttttttggcattttcaagattttattgtaaaacagagctgaagtcacaggaagtagggaactttgcacccaacatatacagcattcattcgctgagtacctgccaagagcgaggctaggtgcttggccctgcagggacctgagacatatacgagtcatgtttcctgctctgcngagctcccagcccagtgggggnagacagggcagaggcacagccattctttcatacaagtctccaagtgccagaagctctacaatgtcaagggagcaatttattccttcagcagagggaaggaaaggaacccccagggggccacattttgcttcaggaggccttgggggagtctggaggaaactttcttgattagggagggttaaaagttactttncagggccagtctttgttaaaaaaanttttggggagttggga

SEQ ID NO: 942 - DNA, 401 bp, Artificial Sequence
  Description of Artificial sequences:primer
  misc_feature (1)..(401): 5' terminal sequence from clone image:36844. interleukin 1 receptor antagonist(IL1RN) gene.
  misc_feature (387)..(387): n is a, c, g, or t
cagaatggaaatctgcagaggcctccgcagtcacctaatcactctcctcctcttcctgttccattcagagacgatctgccgaccctctgggagaaaatccagcaagatgcaagccttcagaatctgggatgttaaccagaagaccttctatctgaggaacaaccaactagttgctggatacttgcaaggaccaaatgtcaatttagaagaaaagatagatgtggtacccattgagcctcatgctctgttcttggggaatccatgggaggggaagatgtgcctgtcctgtgttcaagtctgggtgatgaggaccagactccagctgggagggcagtttaacattcactggaccttgaggcgaggaacaggaaaggcagggacaagcgntttcggcttttcat

SEQ ID NO: 943 - DNA, 1973 bp, Artificial Sequence
  Description of Artificial sequences:primer
  misc_feature (1)..(1973): interleukin 1 receptor antagonist(IL1RN) gene.
gggcagctccaccctgggagggactgtggcccaggtactgcccgggtgctactttatgggcagcagctcagttgagttagagtctggaagacctcagaagacctcctgtcctatgaggccctccccatggctttagggggattataaaactaatcatcaaagccaagaaggcaagagcaagcatgtaccgctgaaaacacaagataactgcataagtaatgactttcagtgcagattcatagctaacccataaactgctggggcaaaaatcatcttggaaggctctgaacctcagaaaggattcacaagacgatctgccgaccctctgggagaaaatccagcaagatgcaagccttcagaatctgggatgttaaccagaagaccttctatctgaggaacaaccaactagttgctggatacttgcaaggaccaaatgtcaatttagaagaaaagatagatgtggtacccattgagcctcatgctctgttcttgggaatccatggagggaagatgtgcctgtcctgtgtcaagtctggtgatgagaccagactccagctggaggcagttaacatcactgacctgagcgagaacagaaagcaggacaagcgcttcgccttcatccgctcagacagcggccccaccaccagttttgagtctgccgcctgccccggttggttcctctgcacagcgatggaagctgaccagcccgtcagcctcaccaatatgcctgacgaaggcgtcatggtcaccaaattctacttccaggaggacgagtagtactgcccaggcctgcctgttcccattcttgcatggcaaggactgcagggactgccagtccccctgccccagggctcccggctatgggggcactgaggaccagccattgaggggtggaccctcagaaggcgtcacaagaacctggtcacaggactctgcctcctcttcaactgaccagcctccatgctgcctccagaatggtctttctaatgtgtgaatcagagcacagcagcccctgcacaaagcccttccatgtcgcctctgcattcaggatcaaaccccgaccacctgcccaacctgctctcctcttgccactgcctcttcctccctcattccaccttcccatgccctggatccatcaggccacttgatgacccccaaccaagtggctcccacaccctgttttacaaaaaagaaaagaccagtccatgagggaggtttttaagggtttgtggaaaatgaaaattaggatttcatgatttttttttttcagtccccgtgaaggagagcccttcatttggagattatgttctttcggggagaggctgaggacttaaaatattcctgcatttgtgaaatgatggtgaaagtaagtggtagcttttcccttctttttcttctttttttgtgatgtcccaacttgtaaaaattaaaagttatggtactatgttagccccataattttttttttccttttaaaacacttccataatctggactcctctgtccaggcactgctgcccagcctccaagctccatctccactccagattttttacagctgcctgcagtactttacctcctatcagaagtttctcagctcccaaggctctgagcaaatgtggctcctgggggttctttcttcctctgctgaaggaataaattgctccttgacattgtagagcttctggcacttggagacttgtatgaaagatggctgtgcctctgcctgtctcccccaccgggctgggagctctgcagagcaggaaacatgactcgtatatgtctcaggtccctgcagggccaagcacctagcctcgctcttggcaggtactcagcgaatgaatgctgtatatgttgggtgcaaagttccctacttcctgtgacttcagctctgttttacaataaaatcttgaaaatgcctaaaaaaaaaaaaaaaaaaaaaaaaaaaaaaaaaaaaaaaaaaaaaaaaaaaa

SEQ ID NO: 944 - DNA, 416 bp, Artificial Sequence
  Description of Artificial sequences:primer
  misc_feature (1)..(416): 3' terminal sequence from clone image:37345. low density lipoprotein-related protein 1 (alpha-2-macroglobulin receptor)(LRP1) gene.
tttttttttacaattttatttataacaatatctgtgttatttagttgtaaaggaattcagcaaaaattattaaaacgttcacgtccccaaaacggggctgcccgctttcccttcctgggtgtggcccacctccttggcgtccccaggggaggggaggctggaggaatgtttaccagaggaagtctccagccctgggaacctcggtgggggccctgggagacagggagggcctgtctgggaggggggttgagcatggccatctcataggtgcccctgggagttggggctggggtttggggtggcctcccccaagaactaaaacactccatcctttcccgcctacctcacccagagccacgtttttccagacaggggcagcaaagaattttccctttcccagaattaggccctcagga

SEQ ID NO: 945 - DNA, 333 bp, Artificial Sequence
  Description of Artificial sequences:primer
  misc_feature (1)..(333): 5' terminal sequence from clone image:37345. low density lipoprotein-related protein 1 (alpha-2-macroglobulin receptor)(LRP1) gene.
  misc_feature (124)..(124): n is a, c, g, or t
  misc_feature (315)..(315): n is a, c, g, or t
  misc_feature (324)..(324): n is a, c, g, or t
ccgctgcaaccccgctacacgggtgacaagtgtgaactggaccagtgctgggagcctgtcgcaatgggggcacctgtgctgcctccccctctggcatgcccacgtgccggtgccccacgggttncacgggccccaaatgcacccagcaggtgtgtgcgggctactgtgccaacaacagcacctgcactgtcaaccagggcaaccagccccagtgccgatgcctacccggcttcctggggcgaccgctgccagtaccggcagtgctctggctactgtgagaactttggcacatggcagatggctgctgatgggctnccgacaatngccgctgca

SEQ ID NO: 946 - DNA, 14896 bp, Artificial Sequence
  Description of Artificial sequences:primer
  misc_feature (1)..(14896): low density lipoprotein-related protein 1 (alpha-2-macroglobulin receptor)(LRP1) gene.
cagcggtgcgagctccaggcccatgcactgaggaggcggaaacaaggggagcccccagagctccatcaagccccctccaaaggctcccctacccggtccacgccccccaccccccctccccgcctcctcccaattgtgcatttttgcagccggaggcggctccgagatggggctgtgagcttcgcccggggagggggaaagagcagcgaggagtgaagcgggggggtggggtgaagggtttggatttcggggcagggggcgcacccccgtcagcaggccctccccaaggggctcggaactctacctcttcacccacgcccctggtgcgctttgccgaaggaaagaataagaacagagaaggaggagggggaaaggaggaaaagggggaccccccaactggggggggtgaaggagagaagtagcaggaccagaggggaaggggctgctgcttgcatcagcccacaccatgctgaccccgccgttgctcctgctgctgcccctgctctcagctctggtcgcggcggctatcgacgcccctaagacttgcagccccaagcagtttgcctgcagagatcaaataacctgtatctcaaagggctggcggtgcgacggtgagagggactgcccagacggatctgacgaggcccctgagatttgtccacagagtaaggcccagcgatgccagccaaacgagcataactgcctgggtactgagctgtgtgttcccatgtcccgcctctgcaatggggtccaggactgcatggacggctcagatgaggggccccactgccgagagctccaaggcaactgctctcgcctgggctgccagcaccattgtgtccccacactcgatgggcccacctgctactgcaacagcagctttcagcttcaggcagatggcaagacctgcaaagattttgatgagtgctcagtgtacggcacctgcagccagctatgcaccaacacagacggctccttcatatgtggctgtgttgaaggatacctcctgcagccggataaccgctcctgcaaggccaagaacgagccagtagaccggccccctgtgctgttgatagccaactcccagaacatcttggccacgtacctgagtggggcccaggtgtctaccatcacacctacgagcacgcggcagaccacagccatggacttcagctatgccaacgagaccgtatgctgggtgcatgttggggacagtgctgctcagacgcagctcaagtgtgcccgcatgcctggcctaaagggcttcgtggatgagcacaccatcaacatctccctcagtctgcaccacgtggaacagatggccatcgactggctgacaggcaacttctactttgtggatgacatcgatgataggatctttgtctgcaacagaaatggggacacatgtgtcacattgctagacctggaactctacaaccccaagggcattgccctggaccctgccatggggaaggtgtttttcactgactatgggcagatcccaaaggtggaacgctgtgacatggatgggcagaaccgcaccaagctcgtcgacagcaagattgtgtttcctcatggcatcacgctggacctggtcagccgccttgtctactgggcagatgcctatctggactatattgaagtggtggactatgagggcaagggccgccagaccatcatccagggcatcctgattgagcacctgtacggcctgactgtgtttgagaattatctctatgccaccaactcggacaatgccaatgcccagcagaagacgagtgtgatccgtgtgaaccgctttaacagcaccgagtaccaggttgtcacccgggtggacaagggtggtgccctccacatctaccaccagaggcgtcagccccgagtgaggagccatgcctgtgaaaacgaccagtatgggaagccgggtggctgctctgacatctgcctgctggccaacagccacaaggcgcggacctgccgctgccgttccggcttcagcctgggcagtgacgggaagtcatgcaagaagccggagcatgagctgttcctcgtgtatggcaagggccggccaggcatcatccggggcatggatatgggggccaaggtcccggatgagcacatgatccccattgaaaacctcatgaacccccgagccctggacttccacgctgagaccggcttcatctactttgccgacaccaccagctacctcattggccgccagaagattgatggcactgagcgggagaccatcctgaaggacggcatccacaatgtggagggtgtggccgtggactggatgggagacaatctgtactggacggacgatgggcccaaaaagacaatcagcgtggccaggctggagaaagctgctcagacccgcaagactttaatcgagggcaaaatgacacaccccagggctattgtggtggatccactcaatgggtggatgtactggacagactgggaggaggaccccaaggacagtcggcgtgggcggctggagagggcgtggatggatggctcacaccgagacatctttgtcacctccaagacagtgctttggcccaatgggctaagcctggacatcccggctgggcgcctctactgggtggatgccttctacgaccgcatcgagacgatactgctcaatggcacagaccggaagattgtgtatgaaggtcctgagctgaaccacgcctttggcctgtgtcaccatggcaactacctcttctggactgagtatcggagtggcagtgtctaccgcttggaacggggtgtaggaggcgcaccccccactgtgacccttctgcgcagtgagcggccccccatctttgagatccgaatgtatgatgcccagcagcagcaagttggcaccaacaaatgccgggtgaacaatggcggctgcagcagcctgtgcttggccacccctgggagccgccagtgcgcctgtgctgaggaccaggtgttggacgcagacggcgtcacttgcttggcgaacccatcctacgtgcctccaccccagtgccagccaggcgagtttgcctgtgccaacagccgctgcatccaggagcgctggaagtgtgacggagacaacgattgcctggacaacagtgatgaggccccagccctctgccatcagcacacctgcccctcggaccgattcaagtgcgagaacaaccggtgcatccccaaccgctggctctgcgacggggacaatgactgtgggaacagtgaagatgagtccaatgccacttgttcagcccgcacctgcccccccaaccagttctcctgtgccagtggccgctgcatccccatctcctggacgtgtgatctggatgacgactgtggggaccgctctgatgagtctgcttcgtgtgcctatcccacctgcttccccctgactcagtttacctgcaacaatggcagatgtatcaacatcaactggagatgcgacaatgacaatgactgtggggacaacagtgacgaagccggctgcagccactcctgttctagcacccagttcaagtgcaacagcgggcgttgcatccccgagcactggacctgcgatggggacaatgactgcggagactacagtgatgagacacacgccaactgcaccaaccaggccacgaggccccctggtggctgccacactgatgagttccagtgccggctggatggactatgcatccccctgcggtggcgctgcgatggggacactgactgcatggactccagcgatgagaagagctgtgagggagtgacccacgtctgcgatcccagtgtcaagtttggctgcaaggactcagctcggtgcatcagcaaagcgtgggtgtgtgatggcgacaatgactgtgaggataactcggacgaggagaactgcgagtccctggcctgcaggccaccctcgcacccttgtgccaacaacacctcagtctgcctgccccctgacaagctgtgtgatggcaacgacgactgtggcgacggctcagatgagggcgagctctgcgaccagtgctctctgaataacggtggctgcagccacaactgctcagtggcacctggcgaaggcattgtgtgttcctgccctctgggcatggagctggggcccgacaaccacacctgccagatccagagctactgtgccaagcatctcaaatgcagccaaaagtgcgaccagaacaagttcagcgtgaagtgctcctgctacgagggctgggtcctggaacctgacggcgagagctgccgcagcctggaccccttcaagccgttcatcattttctccaaccgccatgaaatccggcgcatcgatcttcacaaaggagactacagcgtcctggtgcccggcctgcgcaacaccatcgccctggacttccacctcagccagagcgccctctactggaccgacgtggtggaggacaagatctaccgcgggaagctgctggacaacggagccctgactagtttcgaggtggtgattcagtatggcctggccacacccgagggcctggctgtagactggattgcaggcaacatctactgggtggagagtaacctggatcagatcgaggtggccaagctggatgggaccctccggaccaccctgctggccggtgacattgagcacccaagggcaatcgcactggatccccgggatgggatcctgttttggacagactgggatgccagcctgccccgcattgaggcagcctccatgagtggggctgggcgccgcaccgtgcaccgggagaccggctctgggggctggcccaacgggctcaccgtggactacctggagaagcgcatcctttggattgacgccaggtcagatgccatttactcagcccgttacgacggctctggccacatggaggtgcttcggggacacgagttcctgtcgcacccgtttgcagtgacgctgtacgggggggaggtctactggactgactggcgaacaaacacactggctaaggccaacaagtggaccggccacaatgtcaccgtggtacagaggaccaacacccagccctttgacctgcaggtgtaccacccctcccgccagcccatggctcccaatccctgtgaggccaatgggggccagggcccctgctcccacctgtgtctcatcaactacaaccggaccgtgtcctgcgcctgcccccacctcatgaagctccacaaggacaacaccacctgctatgagtttaagaagttcctgctgtacgcacgtcagatggagatccgaggtgtggacctggatgctccctactacaactacatcatctccttcacggtgcccgacatcgacaacgtcacagtgctagactacgatgcccgcgagcagcgtgtgtactggtctgacgtgcggacacaggccatcaagcgggccttcatcaacggcacaggcgtggagacagtcgtctctgcagacttgccaaatgcccacgggctggctgtggactgggtctcccgaaacctgttctggacaagctatgacaccaataagaagcagatcaatgtggcccggctggatggctccttcaagaacgcagtggtgcagggcctggagcagccccatggccttgtcgtccaccctctgcgtgggaagctctactggaccgatggtgacaacatcagcatggccaacatggatggcagcaatcgcaccctgctcttcagtggccagaagggccccgtgggcctggctattgacttccctgaaagcaaactctactggatcagctccgggaaccataccatcaaccgctgcaacctggatgggagtgggctggaggtcatcgatgccatgcggagccagctgggcaaggccaccgccctggccatcatgggggacaagctgtggtgggctgatcaggtgtcggaaaagatgggcacatgcagcaaggctgacggctcgggctccgtggtccttcggaacagcaccaccctggtgatgcacatgaaggtctatgacgagagcatccagctggaccataagggcaccaacccctgcagtgtcaacaacggtgactgctcccagctctgcctgcccacgtcagagacgacccgctcctgcatgtgcacagccggctatagcctccggagtggccagcaggcctgcgagggcgtaggttcctttctcctgtactctgtgcatgagggaatcaggggaattcccctggatcccaatgacaagtcagatgccctggtcccagtgtccgggacctcgctggctgtcggcatcgacttccacgctgaaaatgacaccatctactgggtggacatgggcctgagcacgatcagccgggccaagcgggaccagacgtggcgtgaagacgtggtgaccaatggcattggccgtgtggagggcattgcagtggactggatcgcaggcaacatctactggacagaccagggctttgatgtcatcgaggtcgcccggctcaatggctccttccgctacgtggtgatctcccagggtctagacaagccccgggccatcaccgtccacccggagaaagggtacttgttctggactgagtggggtcagtatccgcgtattgagcggtctcggctagatggcacggagcgtgtggtgctggtcaacgtcagcatcagctggcccaacggcatctcagtggactaccaggatgggaagctgtactggtgcgatgcacggacagacaagattgaacggatcgacctggagacaggtgagaaccgcgaggtggttctgtccagcaacaacatggacatgttttcagtgtctgtgtttgaggatttcatctactggagtgacaggactcatgccaacggctctatcaagcgcgggagcaaagacaatgccacagactccgtgcccctgcgaaccggcatcggcgtccagcttaaagacatcaaagtcttcaaccgggaccggcagaaaggcaccaacgtgtgcgcggtggccaatggcgggtgccagcagctgtgcctgtaccggggccgtgggcagcgggcctgcgcctgtgcccacgggatgctggctgaagacggagcatcgtgccgcgagtatgccggctacctgctctactcagagcgcaccattctcaagagtatccacctgtcggatgagcgcaacctcaatgcgcccgtgcagcccttcgaggaccctgagcacatgaagaacgtcatcgccctggcctttgactaccgggcaggcacctctccgggcacccccaatcgcatcttcttcagcgacatccactttgggaacatccaacagatcaacgacgatggctccaggaggatcaccattgtggaaaacgtgggctccgtggaaggcctggcctatcaccgtggctgggacactctctattggacaagctacacgacatccaccatcacgcgccacacagtggaccagacccgcccaggggccttcgagcgtgagaccgtcatcactatgtctggagatgaccacccacgggccttcgttttggacgagtgccagaacctcatgttctggaccaactggaatgagcagcatcccagcatcatgcgggcggcgctctcgggagccaatgtcctgacccttatcgagaaggacatccgtacccccaatggcctggccatcgaccaccgtgccgagaagctctacttctctgacgccaccctggacaagatcgagcggtgcgagtatgacggctcccaccgctatgtgatcctaaagtcagagcctgtccaccccttcgggctggccgtgtatggggagcacattttctggactgactgggtgcggcgggcagtgcagcgggccaacaagcacgtgggcagcaacatgaagctgctgcgcgtggacatcccccagcagcccatgggcatcatcgccgtggccaacgacaccaacagctgtgaactctctccatgccgaatcaacaacggtggctgccaggacctgtgtctgctcactcaccagggccatgtcaactgctcatgccgagggggccgaatcctccaggatgacctcacctgccgagcggtgaattcctcttgccgagcacaagatgagtttgagtgtgccaatggcgagtgcatcaacttcagcctgacctgcgacggcgtcccccactgcaaggacaagtccgatgagaagccatcctactgcaactcccgccgctgcaagaagactttccggcagtgcagcaatgggcgctgtgtgtccaacatgctgtggtgcaacggggccgacgactgtggggatggctctgacgagatcccttgcaacaagacagcctgtggtgtgggcgagttccgctgccgggacgggacctgcatcgggaactccagccgctgcaaccagtttgtggattgtgaggacgcctcagatgagatgaactgcagtgccaccgactgcagcagctacttccgcctgggcgtgaagggcgtgctcttccagccctgcgagcggacctcactctgctacgcacccagctgggtgtgtgatggcgccaatgactgtggggactacagtgatgagcgcgactgcccaggtgtgaaacgccccagatgccctctgaattacttcgcctgccctagtgggcgctgcatccccatgagctggacgtgtgacaaagaggatgactgtgaacatggcgaggacgagacccactgcaacaagttctgctcagaggcccagtttgagtgccagaaccatcgctgcatctccaagcagtggctgtgtgacggcagcgatgactgtggggatggctcagacgaggctgctcactgtgaaggcaagacgtgcggcccctcctccttctcctgccctggcacccacgtgtgcgtccccgagcgctggctctgtgacggtgacaaagactgtgctgatggtgcagacgagagcatcgcagctggttgcttgtacaacagcacttgtgacgaccgtgagttcatgtgccagaaccgccagtgcatccccaagcacttcgtgtgtgaccacgaccgtgactgtgcagatggctctgatgagtcccccgagtgtgagtacccgacctgcggccccagtgagttccgctgtgccaatgggcgctgtctgagctcccgccagtgggagtgtgatggcgagaatgactgccacgaccagagtgacgaggctcccaagaacccacactgcaccagcccagagcacaagtgcaatgcctcgtcacagttcctgtgcagcagtgggcgctgtgtggctgaggcactgctctgcaacggccaggatgactgtggcgacagctcggacgagcgtggctgccacatcaatgagtgtctcagccgcaagctcagtggctgcagccaggactgtgaggacctcaagatcggcttcaagtgccgctgtcgccctggcttccggctgaaggatgacggccggacgtgtgctgatgtggacgagtgcagcaccaccttcccctgcagccagcgctgcatcaacacccatggcagctataagtgtctgtgtgtggagggctatgcaccccgcggcggcgacccccacagctgcaaggctgtgactgacgaggaaccgtttctgatcttcgccaaccggtactacctgcgcaagctcaacctggacgggtccaactacacgttacttaagcagggcctgaacaacgccgttgccttggattttgactaccgagagcagatgatctactggacagatgtgaccacccagggcagcatgatccgaaggatgcaccttaacgggagcaatgtgcaggtcctacaccgtacaggcctcagcaaccccgatgggctggctgtggactgggtgggtggcaacctgtactggtgcgacaaaggccgggacaccatcgaggtgtccaagctcaatggggcctatcggacggtgctggtcagctctggcctccgtgagcccagggctctggtggtggatgtgcagaatgggtacctgtactggacagactggggtgaccattcactgatcggccgcatcggcatggatgggtccagccgcagcgtcatcgtggacaccaagatcacatggcccaatggcctgacgctggactatgtcactgagcgcatctactgggccgacgcccgcgaggactacattgaatttgccagcctggatggctccaatcgccacgttgtgctgagccaggacatcccgcacatctttgcactgaccctgtttgaggactacgtctactggaccgactgggaaacaaagtccattaaccgagcccacaagaccacgggcaccaacaaaacgctcctcatcagcacgctgcaccggcccatggacctgcatgtcttccatgccctgcgccagccagacgtgcccaatcacccctgcaaggtcaacaatggtggctgcagcaacctgtgcctgctgtcccccgggggagggcacaaatgtgcctgccccaccaacttctacctgggcagcgatgggcgcacctgtgtgtccaactgcacggctagccagtttgtatgcaagaacgacaagtgcatccccttctggtggaagtgtgacaccgaggacgactgcggggaccactcagacgagcccccggactgccctgagttcaagtgccggcccggacagttccagtgctccacaggtatctgcacaaaccctgccttcatctgcgatggcgacaatgactgccaggacaacagtgacgaggccaactgtgacatccacgtctgcttgcccagtcagttcaaatgcaccaacaccaaccgctgtattcccggcatcttccgctgcaatgggcaggacaactgcggagatggggaggatgagagggactgccccgaggtgacctgcgcccccaaccagttccagtgctccattaccaaacggtgcatcccccgggtctgggtctgcgaccgggacaatgactgtgtggatggcagtgatgagcccgccaactgcacccagatgacctgtggtgtggacgagttccgctgcaaggattcgggccgctgcatcccagcgcgttggaagtgtgacggagaggatgactgtggggatggctcggatgagcccaaggaagagtgtgatgaacgcacctgtgagccataccagttccgctgcaagaacaaccgctgcgtgcccggccgctggcagtgcgactacgacaacgattgcggtgacaactccgatgaagagagctgcacccctcggccctgctccgagagtgagttctcctgtgccaacggccgctgcatcgcggggcgctggaaatgcgatggagaccacgactgcgcggacggctcggacgagaaagactgcaccccccgctgtgacatggaccagttccagtgcaagagcggccactgcatccccctgcgctggcgctgtgacgcagacgccgactgcatggacggcagcgacgaggaggcctgcggcactggcgtgcggacctgccccctggacgagttccagtgcaacaacaccttgtgcaagccgctggcctggaagtgcgatggcgaggatgactgtggggacaactcagatgagaaccccgaggagtgtgcccggttcgtgtgccctcccaaccggcccttccgttgcaagaatgaccgcgtctgtctgtggatcgggcgccaatgcgatggcacggacaactgtggggatgggactgatgaagaggactgtgagccccccacagcccacaccacccactgcaaagacaagaaggagtttctgtgccggaaccagcgctgcctctcctcctccctgcgctgcaacatgttcgatgactgcggggacggctctgacgaggaggactgcagcatcgaccccaagctgaccagctgcgccaccaatgccagcatctgtggggacgaggcacgctgcgtgcgcaccgagaaagcggcctactgtgcctgccgctcgggcttccacaccgtgcccggccagcccggatgccaagacatcaacgagtgcctgcgcttcggcacctgctcccagctctgcaacaacaccaagggcggccacctctgcagctgcgctcggaacttcatgaagacgcacaacacctgcaaggccgaaggctctgagtaccaggtcctgtacatcgctgatgacaatgagatccgcagcctgttccccggccacccccattcggcttacgagcaggcattccagggtgacgagagtgtccgcattgatgctatggatgtccatgtcaaggctggccgtgtctattggaccaactggcacacgggcaccatctcctaccgcagcctgccacctgctgcgcctcctaccacttccaaccgccaccggcgacagattgaccggggtgtcacccacctcaacatttcagggctgaagatgcccagaggcatcgccatcgactgggtggccggaaacgtgtactggaccgactcgggccgagatgtgattgaggtggcgcagatgaagggcgagaaccgcaagacgctcatctcgggcatgattgacgagccccacgccattgtggtggacccactgagggggaccatgtactggtcagactggggcaaccaccccaagattgagacggcagcgatggatgggacgcttcgggagacactggtgcaggacaacattcagtggcccacaggcctggccgtggattatcacaatgagcggctgtactgggcagacgccaagctttcagtcatcggcagcatccggctcaatggcacggaccccattgtggctgctgacagcaaacgaggcctaagtcaccccttcagcatcgacgtctttgaggattacatctatggtgtcacctacatcaataatcgtgtcttcaagatccataagtttggccacagccccttggtcaacctgacagggggcctgagccacgcctctgacgtggtcctttaccatcagcacaagcagcccgaagtgaccaacccatgtgaccgcaagaaatgcgagtggctctgcctgctgagccccagtgggcctgtctgcacctgtcccaatgggaagcggctggacaacggcacatgcgtgcctgtgccctctccaacgccccccccagatgctccccggcctggaacctgtaacctgcagtgcttcaacggtggcagctgtttcctcaatgcacggaggcagcccaagtgccgctgccaaccccgctacacgggtgacaagtgtgaactggaccagtgctgggagcactgtcgcaatgggggcacctgtgctgcctccccctctggcatgcccacgtgccggtgccccacgggcttcacgggccccaaatgcacccagcaggtgtgtgcgggctactgtgccaacaacagcacctgcactgtcaaccagggcaaccagccccagtgccgatgcctacccggcttcctgggcgaccgctgccagtaccggcagtgctctggctactgtgagaactttggcacatgccagatggctgctgatggctcccgacaatgccgctgcactgcctactttgagggatcgaggtgtgaggtgaacaagtgcagccgctgtctcgaaggggcctgtgtggtcaacaagcagagtggggatgtcacctgcaactgcacggatggccgggtggcccccagctgtctgacctgcgtcggccactgcagcaatggcggctcctgtaccatgaacagcaaaatgatgcctgagtgccagtgcccaccccacatgacagggccccggtgtgaggagcacgtcttcagccagcagcagccaggacatatagcctccatcctaatccctctgctgttgctgctgctgctggttctggtggccggagtggtattctggtataagcggcgagtccaaggggctaagggcttccagcaccaacggatgaccaacggggccatgaacgtggagattggaaaccccacctacaagatgtacgaaggcggagagcctgatgatgtgggaggcctactggacgctgactttgccctggaccctgacaagcccaccaacttcaccaaccccgtgtatgccacactctacatggggggccatggcagtcgccactccctggccagcacggacgagaagcgagaactcctgggccggggccctgaggacgagataggggaccccttggcatagggccctgccccgtcggactgcccccagaaagcctcctgccccctgccggtgaagtccttcagtgagcccctccccagccagcccttccctggccccgccggatgtataaatgtaaaaatgaaggaattacattttatatgtgagcgagcaagccggcaagcgagcacagtattatttctccatcccctccctgcctgctccttggcacccccatgctgccttcagggagacaggcagggagggcttggggctgcacctcctaccctcccaccagaacgcaccccactgggagagctggtggtgcagccttcccctccctgtataagacactttgccaaggctctcccctctcgccccatccctgcttgcccgctcccacagcttcctgagggctaattctgggaagggagagttctttgctgcccctgtctggaagacgtggctctgggtgaggtaggcgggaaaggatggagtgttttagttcttgggggaggccaccccaaaccccagccccaactccaggggcacctatgagatggccatgctcaacccccctcccagacaggccctccctgtctccagggcccccaccgaggttcccagggctggagacttcctctggtaaacattcctccagcctcccctcccctggggacgccaaggaggtgggccacacccaggaagggaaagcgggcagccccgttttggggacgtgaacgttttaataatttttgctgaattctttacaactaaataacacagatattcttataaataaaattgtaaaaaaaaaaa

SEQ ID NO: 947 - DNA, 479 bp, Artificial Sequence
  Description of Artificial sequences:primer
  misc_feature (1)..(479): 3' terminal sequence from clone image:37496. hypothetical protein dj1042k10.2(DJ1042K10.2) gene.
  misc_feature (11)..(11): n is a, c, g, or t
  misc_feature (101)..(101): n is a, c, g, or t
  misc_feature (105)..(105): n is a, c, g, or t
  misc_feature (294)..(294): n is a, c, g, or t
  misc_feature (319)..(319): n is a, c, g, or t
  misc_feature (355)..(355): n is a, c, g, or t
  misc_feature (394)..(394): n is a, c, g, or t
  misc_feature (408)..(408): n is a, c, g, or t
  misc_feature (424)..(424): n is a, c, g, or t
  misc_feature (461)..(461): n is a, c, g, or t
ttttttttttnttagtccatcttattcagtccatggaaggggtgggtagcacagctgggtcccgggtctgttgtgtcccagcatctgaggggccacgcagncctntctagaccactcaaggaagggcagaaccttggacctgaatacagctctgcagccctagctcaccagaagacaggtaggtgctttctcaaagacagacacagtttatttataaaccaaagaggccaggagcctactagccacccccatccccttccctcttcctgagcacagacatggctcccccacctnctcacaaggtttttggtacaaactntggtttggcctagagcatccctaaggaccctgggtngggcagggtaccctttgttcccaccacctggggatgtgntggggaacgtgganttggggcagcctgatnttgatatcccgcggccccggcagggtttttgggagtngttttcctgggttttgca

SEQ ID NO: 948 - DNA, 383 bp, Artificial Sequence
  Description of Artificial sequences:primer
  misc_feature (1)..(383): 5' terminal sequence from clone image:37496. hypothetical protein dj1042k10.2(DJ1042K10.2) gene.
  misc_feature (338)..(338): n is a, c, g, or t
  misc_feature (378)..(378): n is a, c, g, or t
ccctgggctgctaccaaacacggccctaactcctccaacccccttggtgggcctgtgttcactgtggcaggagctgactccagactatagcatggagagccaccagcgggaccacgagaactacgtggcgtgctcacgcagccaccgggccgagccaaggccctgctggactttgagcggcacgacgacgacgagctgggcttccgcaagaacgacatcatcacaatcgtgtctcagaaggacgagcactgctgggtgggggagctcaacggcctgcgaggctggttttcagccaagtttcgttggaagttctgggatgagcgcagaaagagtacttncattcgcgggggatgacttcggttaacggaaggggttaanagact

SEQ ID NO: 949 - DNA, 2834 bp, Artificial Sequence
  Description of Artificial sequences:primer
  misc_feature (1)..(2834): hypothetical protein dj1042k10.2(DJ1042K10.2) gene.
ggcacgaggtggggaagctgctaacccgacccggattggcgctgaggtggcccgtggggcagggcagatgattctggaccagatgaagcctgaggagccttccagctctaagatagcaggataggagacttctaagattggagctgcagaagacttgccagcccaccagcacaatgtcaggaagccatacacctgcctgtggccctttctcagccctgactccgagcatatggccccaggagatcttggccaagtacacgcagaaggaagagtcagcagagcaaccagagttctactacgatgagtttggtttccgtgtgtacaaggaagaaggtgatgagcctggctccagtctgctggcgaactcccctctgatggaggatgctccacagaggctgcggtggcaggcccacctggagttcacccataaccacgatgtgggggatctcacctgggacaagattgccgtctccctaccccgctctgagaagctccgctccctggtgctggccggcatcccacatggcatgaggccacagctgtggatgcggctctctggggccctgcagaagaagaggaactctgagctgtcctaccgcgagattgtgaagaacagctccaacgatgagaccatcgctgccaagcagatcgagaaggacctgctccgcaccatgcccagcaacgcctgcttcgccagcatgggtagcatcggggtgccccgcctgcgcagggtgctccgggccctggcctggctctacccagagatcggctactgccagggcaccggcatggtggccgcctgcctcctgctgttcctggaggaggaggacgccttctggatgatgtctgccatcatcgaggacctgctccccgcctcctacttcagcaccaccctgctgggtgtccagactgaccagcgggtcctgcgccacctcattgtccagtacctgcctcgcctggacaagctgctccaggagcatgacattgagctgtccctgatcacactgcactggttcctcacggccttcgccagcgtggtggacatcaagctgctcctgcgcatctgggacctgtttttctacgagggctcccgggtgctgttccagctcacgctgggcatgctgcacctcaaggaggaagagctgatccagtcagagaactcggcctccatcttcaacacgctatcggatatcccgtcgcagatggaggacgcggagctgcttctgggggtggccatgcggctggccggctccctcaccgatgtggccgtggagactcagcgccgcaagcacctggcctatctcattgcagaccagggccagctcctgggggccggcaccctcaccaacctctctcaggttgttcgccgcaggacccagcggaggaagtccaccatcactgctctgctcttcggggaggatgacctggaggcactcaaggccaagaacatcaagcagacggaactggtggctgacctccgggaagccatcctgcgcgtggcacgccacttccagtgcacagaccccaaaaactgcagcgtggagctgactccagactatagcatggagagccaccagcgggaccacgagaactacgtggcgtgctcacgcagccaccggcgccgagccaaggccctgctggactttgagcggcacgacgacgacgagctgggcttccgcaagaacgacatcatcacaatcgtgtctcagaaggacgagcactgctgggtgggggagctcaacggcctgcgaggctggtttccagccaagttcgtggaagtcctggatgagcgcagcaaagagtactccatcgcgggggatgactcggtgacggagggggtcacagacctcgtgcgagggaccctctgcccggcccttaaggccctgttcgaacatggactgaagaagccatccctgcttgggggcgcctgccacccctggctgtttatcgaggaggctgcaggccgggaggtcgagagagactttgcctccgtgtattcccgtctggtgctctgtaagaccttcaggttggatgaagatggcaaagtcctgaccccggaggagctgctctaccgggctgtgcagtctgtgaacgtgacccacgatgcagtgcatgcacaaatggatgtgaagctccgctcactgatctgcgtggggctcaatgagcaggtgctgcacctgtggctggaggtgctctgctccagcctgcccaccgtggagaagtggtaccagccctggtccttcctgcgcagcccgggctgggtccagatcaagtgtgagctccgagtcctctgctgctttgccttcagcctctcccaggactgggagctccctgcgaagagagaggcgcagcagcccctgaaggagggcgtccgggacatgctggtgaagcaccacctcttcagctgggatgtggacgggtgaccccctcctccccagcccaacctcgggcctgcgtctgaggtggcccaggaccccaagctgcagagcccagggaagagcagctccagagccctggccggggccgcgggatatcaatatcaggctgccccactccacgttccccagcacatcccaggtggtgggagcagagggtaccctgccccaccagggtccttagggatgctctaggccaaaccacagtttgtaccaaaaaccttgtgaggaggtgggggagccatgtctgtgctcaggaagagggaaggggatgggggtggctagtaggctcctggcctctttggtttataaataaactgtgtctgtctttgaaaaaaaaaaaaaaaaaaaaaaaaaaaaaaaaaaaaaaaaaaaaaaaaaaaaaaaaaaaaaaaaaaa

SEQ ID NO: 950 - DNA, 482 bp, Artificial Sequence
  Description of Artificial sequences:primer
  misc_feature (1)..(482): 3' terminal sequence from clone image:37506. protein tyrosine phosphatase, receptor type, n polypeptide 2(PTPRN2) gene.
  misc_feature (67)..(68): n is a, c, g, or t
  misc_feature (215)..(215): n is a, c, g, or t
  misc_feature (236)..(236): n is a, c, g, or t
  misc_feature (324)..(324): n is a, c, g, or t
  misc_feature (405)..(405): n is a, c, g, or t
  misc_feature (437)..(437): n is a, c, g, or t
  misc_feature (445)..(445): n is a, c, g, or t
  misc_feature (479)..(479): n is a, c, g, or t
ttttttttgaaatcagaagtttaatatgacacaattaaatatatttgtatatctcacaccggagttnnctcttcaaacataaggagttagaaattacaagtaggcatatgcttcctatattcagataaattcatttcgattaattaaattccagatagagagaagtaattttggaaaagaaatgatagctatattaaagcagatattcattacantaccatgtagagacataagcnatattttggcatcattctgtccgctcagtaggccgtgttccctctggtagggcctttggagagtaccatctatctaagatgggaggantgctgtggggaagggcgggatgggaggtgcgttttctacggtgaaccccacacagggaaatctggcagcccacacaggctncctctgcgccgcctttccatgtggtccatccngggtcatngaagtgattgtgccctttctggggtagggggtgntat

SEQ ID NO: 951 - DNA, 438 bp, Artificial Sequence
  Description of Artificial sequences:primer
  misc_feature (1)..(438): 5' terminal sequence from clone image:37506. protein tyrosine phosphatase, receptor type, n polypeptide 2(PTPRN2) gene.
  misc_feature (280)..(280): n is a, c, g, or t
  misc_feature (420)..(420): n is a, c, g, or t
acagccgtggtgtgagaggtgaacgccatcctcaaggcccttccccagtgagcggcactcaggggcctcaggggagcccccaccccacggatgttgtcaggaatcatgatctgactttaattgtgtgtcttctattataactgcatagtaatagggcccttagctctcccgtagtcagcgcagtttagcagttaaaagtgtatttttgtttaatcaaacaataataaagagagatttgtgggaaaaatccagttacgggtgggaggggaatcggttcatnaattttcacttgcttaaaaaaaatactttttcttaaagcacccgttcaccttacttgggttgaagttgtgttaacaatgcagtagccagcacgttcgagggcggtttccaggggaggagtgtgcttgttcatcttgccanttttcggggaggggtggg

SEQ ID NO: 952 - DNA, 4767 bp, Artificial Sequence
  Description of Artificial sequences:primer
  misc_feature (1)..(4767): protein tyrosine phosphatase, receptor type, n polypeptide 2(PTPRN2) gene.
gcctcccgccgcctcccgcgcggccatggactgagcgccgccggccaggccgcggggatggggccgccgctcccgctgctgctgctgctactgctgctgctgccgccacgcgtcctgcctgccgccccttcgtccgtcccccgcggccggcagctcccggggcgtctgggctgcctgctcgaggagggcctctgcggagcgtccgaggcctgtgtgaacgatggagtgtttggaaggtgccagaaggttccggcaatggacttttaccgctacgaggtgtcgcccgtggccctgcagcgcctgcgcgtggcgttgcagaagctttccggcacaggtttcacgtggcaggatgactatactcagtatgtgatggaccaggaacttgcagacctcccgaaaacctacctgaggcgtcctgaagcatccagcccagccaggccctcaaaacacagcgttggcagcgagaggaggtacagtcgggagggcggtgctgccctggccaacgccctccgacgccacctgcccttcctggaggccctgtcccaggccccagcctcagacgtgctcgccaggacccatacggcgcaggacagaccccccgctgagggtgatgaccgcttctccgagagcatcctgacctatgtggcccacacgtctgcgctgacctaccctcccgggccccggacccagctccgcgaggacctcctgccgcggaccctcggccagctccagccagatgagctcagccctaaggtggacagtggtgtggacagacaccatctgatggcggccctcagtgcctatgctgcccagaggcccccagctccccccggggagggcagcctggagccacagtaccttctgcgtgcaccctcaagaatgcccaggcctttgctggcaccagccgccccccagaagtggccttcacctctgggagattccgaagacccctccagcacaggcgatggagcacggattcataccctcctgaaggacctgcagaggcagccggctgaggtgaggggcctgagtggcctggagctggacggcatggctgagctgatggctggcctgatgcaaggcgtggaccatggagtagctcgaggcagccctgggagagcggccctgggagagtctggagaacaggcggatggccccaaggccaccctccgtggagacagctttccagatgacggagtgcaggacgacgatgatagactttaccaagaggtccatcgtctgagtgccacactcgggggcctcctgcaggaccacgggtctcgactcttacctggagccctcccctttgcaaggcccctcgacatggagaggaagaagtccgagcaccctgagtcttccctgtcttcagaagaggagactgccggagtggagaacgtcaagagccagacgtattccaaagatctgctggggcagcagccgcattcggagcccggggccgctgcgtttggggagctccaaaaccagatgcctgggccctcgaaggaggagcagagccttccagcgggtgctcaggaggccctcagcgacggcctgcaattggaggtccagccttccgaggaagaggcgcggggctacatcgtgacagacagagaccccctgcgccccgaggaaggaaggcggctggtggaggacgtcgcccgcctcctgcaggtgcccagcagtgcgttcgctgacgtggaggttctcggaccagcagtgaccttcaaagtgagcgccaatgtccaaaacgtgaccactgaggatgtggagaaggccacagttgacaacaaagacaaactggaggaaacctctggactgaaaattcttcaaaccggagtcgggtcgaaaagcaaactcaagttcctgcctcctcaggcggagcaagaagactccaccaagttcatcgcgctcaccctggtctccctcgcctgcatcctgggcgtcctcctggcctctggcctcatctactgcctccgccatagctctcagcacaggctgaaggagaagctctcgggactagggggcgacccaggtgcagatgccactgccgcctaccaggagctgtgccgccagcgtatggccacgcggccaccagaccgacctgagggcccgcacacgtcacgcatcagcagcgtctcatcccagttcagcgacgggccgatccccagcccctccgcacgcagcagcgcctcatcctggtccgaggagcctgtgcagtccaacatggacatctccaccggccacatgatcctgtcctacatggaggaccacctgaagaacaagaaccggctggagaaggagtgggaagcgctgtgcgcctaccaggcggagcccaacagctcgttcgtggcccagagggaggagaacgtgcccaagaaccgctccctggctgtgctgacctatgaccactcccgggtcctgctgaaggcggagaacagccacagccactcagactacatcaacgctagccccatcatggatcacgacccgaggaaccccgcgtacatcgccacccagggaccgctgcccgccaccgtggctgacttttggcagatggtgtgggagagcggctgcgtggtgatcgtcatgctgacacccctcgcggagaacggcgtccggcagtgctaccactactggccggatgaaggctccaatctctaccacatctatgaggtgaacctggtctccgagcacatctggtgtgaggacttcctggtgaggagcttctatctgaagaacctgcagaccaacgagacgcgcaccgtgacgcagttccacttcctgagttggtatgaccgaggagtcccttcctcctcaaggtccctcctggacttccgcagaaaagtaaacaagtgctacaggggccgttcttgtccaataattgttcattgcagtgacggtgcaggccggagcggcacctacgtcctgatcgacatggttctcaacaagatggccaaaggtgctaaagagattgatatcgcagcgaccctggagcacttgagggaccagagacccggcatggtccagacgaaggagcagtttgagttcgcgctgacagccgtggctgaggaggtgaacgccatcctcaaggcccttccccagtgagcggcagcctcaggggcctcaggggagcccccaccccacggatgttgtcaggaatcatgatctgactttaattgtgtgtcttctattataactgcatagtaatagggcccttagctctcccgtagtcagcgcagtttagcagttaaaagtgtatttttgtttaatcaaacaataataaagagagatttgtggaaaaatccagttacgggtggaggggaatcggttcatcaattttcacttgcttaaaaaaaatactttttcttaaagcacccgttcaccttcttggttgaagttgtgttaacaatgcagtagccagcacgttcgaggcggtttccaggaagagtgtgcttgtcatctgccactttcgggagggtggatccactgtgcaggagtggccggggaagctggcagcactcagtgaggccgcccggcacacaaggcacgtttggcatttctctttgagagagtttatcattgggagaagccgcggggacagaactgaacgtcctgcagcttcggggcaagtgagacaatcacagctcctcgctgcgtctccatcaacactgcgccgggtaccatggacggccccgtcagccacacctgtcagcccaagcagagtgattcaggggctccccgggggcagacacctgtgcaccccatgagtagtgcccacttgaggctggcactcccctgacctcacctttgcaaagttacagatgcaccccaacattgagatgtgtttttaatgttaaaatattgatttctacgttatgaaaacagatgcccccgtgaatgcttacctgtgagataaccacaaccaggaagaacaaatctgggcattgagcaagctatgagggtccccgggagcacacgaaccctgccaggcccccgctggctcctccaggcacgtcccggacctgtggggccccagagaggggacatttccctcctgggagagaaggagatcagggcaactcggagagggctgcgagcatttccctcccgggagaggagatcagggcgacctgcacgcactgcgtagagcctggaagggaagtgagaaaccagccgaccggccctgcccctcttcccgggatcacttaatgaaccacgtgttttgacatcatgtaaacctaagcacgtagagatgattcggatttgacaaaataacatttgagtatccgattcgccatcaccccctaccccagaaataggacaattcacttcattgaccaggatgatcacatggaaggcggcgcagaggcagctgtgtgggctgcagatttcctgtgtggggttcagcgtagaaaacgcacctccatcccgcccttcccacagcattcctccatcttagatagatggtactctccaaaggccctaccagagggaacacggcctactgagcggacagaatgatgccaaaatattgcttatgtctctacatggtattgtaatgaatatctgctttaatatagctatcatttcttttccaaaattacttctctctatctggaatttaattaatcgaaatgaatttatctgaatataggaagcatatgcctacttgtaatttctaactccttatgtttgaagagaaacctccggtgtgagatatacaaatatatttaattgtgtcatattaaacttctgattcaaaaaaaa

SEQ ID NO: 953 - DNA, 437 bp, Artificial Sequence
  Description of Artificial sequences:primer
  misc_feature (1)..(437): 3' terminal sequence from clone image:375781. cyclin b2(CCNB2) gene.
  misc_feature (261)..(261): n is a, c, g, or t
  misc_feature (361)..(361): n is a, c, g, or t
  misc_feature (373)..(373): n is a, c, g, or t
  misc_feature (408)..(408): n is a, c, g, or t
  misc_feature (420)..(420): n is a, c, g, or t
  misc_feature (426)..(426): n is a, c, g, or t
tttttttaagaaaaaccaatcgctttatttttcctcaatatatgtttagaaaactggtctgagagaggtttcatgagatagaccagaggactatgtacaaaatcaagagttctaaaccaataagaaaaagggcacaatgaagcacacatccccaggggccacggcagcctaggaccttcctatcagtggggaggcaaggtctttgacggcttttgagttcagctgagggatcatgctgatcttcaggagtttgctgcttgnatacttatttcttgatggcgatgaatttagttaagttttcatttactttcaccacattcttggccatgtgctgcatgacttccaatacttcattctctgnggtatcctggtngtaaatactgctggctttaaagttccatttttccntggtcctagaancttctnctcgtggccga

SEQ ID NO: 954 - DNA, 265 bp, Artificial Sequence
  Description of Artificial sequences:primer
  misc_feature (1)..(265): 5' terminal sequence from clone image:375781. cyclin b2(CCNB2) gene.
  misc_feature (11)..(11): n is a, c, g, or t
  misc_feature (248)..(248): n is a, c, g, or t
aattcggcacnaggagaaggttctaggacaaggaaaatggaacttaaagcagcagtattacacaggatacacagagaatgaagtattggaagtcatgcagcacatggccaagaatgtggtgaaagtaaatgaaaacttaactaaattcatcgccatcaagaataagtatgcaagcagcaaactcctgaagatcagcatgatccctcagctgaactcaaaagccgtcaaagaccttgcctccccactgntaggaaggtcctaggct

SEQ ID NO: 955 - DNA, 1530 bp, Artificial Sequence
  Description of Artificial sequences:primer
  misc_feature (1)..(1530): cyclin b2(CCNB2) gene.
aatcctggaacaaggctacagcgtcgaagatccccagcgctgcgggctcggagagcagtcctaacggcgcctcgtacgctagtgtcctcccttttcagtccgcgtccctccctgggccgggctggcactcttgccttccccgtccctcatggcgctgctccgacgcccgacggtgtccagtgatttggagaatattgacacaggagttaattctaaagttaagagtcatgtgactattaggcgaactgttttagaagaaattggaaatagagttacaaccagagcagcacaagtagctaagaaagctcagaacaccaaagttccagttcaacccaccaaaacaacaaatgtcaacaaacaactgaaacctactgcttctgtcaaaccagtacagatggaaaagttggctccaaagggtccttctcccacacctgaggatgtctccatgaaggaagagaatctctgccaagctttttctgatgccttgctctgcaaaatcgaggacattgataacgaagattgggagaaccctcagctctgcagtgactacgttaaggatatctatcagtatctcaggcagctggaggttttgcagtccataaacccacatttcttagatggaagagatataaatggacgcatgcgtgccatcctagtggattggctggtacaagtccactccaagtttaggcttctgcaggagactctgtacatgtgcgttggcattatggatcgatttttacaggttcagccagtttcccggaagaagcttcaattagttgggattactgctctgctcttggcttccaagtatgaggagatgttttctccaaatattgaagactttgtttacatcacagacaatgcttataccagttcccaaatccgagaaatggaaactctaattttgaaagaattgaaatttgagttgggtcgacccttgccactacacttcttaaggcgagcatcaaaagccggggaggttgatgttgaacagcacactttagccaagtatttgatggagctgactctcatcgactatgatatggtgcattatcatccttctaaggtagcagcagctgcttcctgcttgtctcagaaggttctaggacaaggaaaatggaacttaaagcagcagtattacacaggatacacagagaatgaagtattggaagtcatgcagcacatggccaagaatgtggtgaaagtaaatgaaaacttaactaaattcatcgccatcaagaataagtatgcaagcagcaaactcctgaagatcagcatgatccctcagctgaactcaaaagccgtcaaagaccttgcctccccactgataggaaggtcctaggctgccgtgggccctggggatgtgtgcttcattgtgccctttttcttattggtttagaactcttgattttgtacatagtcctctggtctatctcatgaaacctcttctcagaccagttttctaaacatatattgaggaaaaataaagcgattggtttttcttaaggtaaaaaaaaaaaaaaaaaa

SEQ ID NO: 956 - DNA, 462 bp, Artificial Sequence
  Description of Artificial sequences:primer
  misc_feature (1)..(462): 3' terminal sequence from clone image:376284. t-complex-associated-testis-expressed 1-like 1(TCTEL1) gene.
  misc_feature (185)..(185): n is a, c, g, or t
  misc_feature (187)..(188): n is a, c, g, or t
  misc_feature (192)..(192): n is a, c, g, or t
  misc_feature (194)..(194): n is a, c, g, or t
  misc_feature (196)..(197): n is a, c, g, or t
  misc_feature (201)..(201): n is a, c, g, or t
  misc_feature (203)..(204): n is a, c, g, or t
  misc_feature (206)..(206): n is a, c, g, or t
  misc_feature (209)..(211): n is a, c, g, or t
  misc_feature (213)..(214): n is a, c, g, or t
  misc_feature (217)..(217): n is a, c, g, or t
  misc_feature (227)..(227): n is a, c, g, or t
  misc_feature (240)..(240): n is a, c, g, or t
  misc_feature (245)..(245): n is a, c, g, or t
  misc_feature (271)..(271): n is a, c, g, or t
  misc_feature (279)..(279): n is a, c, g, or t
  misc_feature (282)..(282): n is a, c, g, or t
  misc_feature (286)..(286): n is a, c, g, or t
  misc_feature (289)..(289): n is a, c, g, or t
  misc_feature (294)..(294): n is a, c, g, or t
  misc_feature (297)..(297): n is a, c, g, or t
  misc_feature (321)..(321): n is a, c, g, or t
  misc_feature (323)..(323): n is a, c, g, or t
  misc_feature (325)..(325): n is a, c, g, or t
  misc_feature (344)..(344): n is a, c, g, or t
  misc_feature (346)..(346): n is a, c, g, or t
  misc_feature (365)..(365): n is a, c, g, or t
  misc_feature (432)..(432): n is a, c, g, or t
tttttagatttgaataatttattctaacaaaagtataaagtatggaaaattagtgtatttgaatcatttcagagagtagagcaagtttcacactagcagatttcagattttagcacctttgaaatgaaatattcagagttaagacaagtggcaacgcaggcttgcaggtgacctacagggatacncnnccgncntnngggncnntncannncnnagngcggccattnggtttttcccccnacatngtgaaagtgccacaaaccaaggggantgggaaangantccnctngaatncanggctggtggttagaggatgaactngngncaaaaggagaaaggccatngntgggactgcaggtcaaatngacagtccgaagcactgacgatgcagtacatggtcttattctcccatcgcacagtgcagctcccgtnagtagagctgtcccagaagcaggaacttgc

SEQ ID NO: 957 - DNA, 505 bp, Artificial Sequence
  Description of Artificial sequences:primer
  misc_feature (1)..(505): 5' terminal sequence from clone image:376284. t-complex-associated-testis-expressed 1-like 1(TCTEL1) gene.
  misc_feature (335)..(335): n is a, c, g, or t
gaaagatggaagactaccaggctgcggaggagactgcttttgttgttgatgaagtgagcaacattgtaagaggctatagaaagcgcaattggtggtaacgcttatcaacacagcaaagtgaaccagtggaccacaaatgtagtagaacaaactttaagccaactcaccaagctgggaaaaccatttaaatacatcgtgacctgtgtaattatgcagaagaatggagctggattacacacagcaagttcctgcttctgggacagctctactgacgggagctgcactgtgcgatgggagaataagaccatgtactgcatcgtcagtgccttcggacntgtctatttgacctgcagtccagcctatggctttctccttttgtccctaagttcatcctctaaccacccagccattgaattcagtgaactcttttctcaattctctttgtgttgtgggcactttcacaatgtagaggaaaaaaccaaatgaccgcactgtgatgtgatgg

SEQ ID NO: 958 - DNA, 713 bp, Artificial Sequence
  Description of Artificial sequences:primer
  misc_feature (1)..(713): t-complex-associated-testis-expressed 1-like 1(TCTEL1) gene.
atggaagactaccaggctgcggaggagactgcttttgttgttgatgaagtgagcaacattgtaaaagaggctatagaaagcgcaattggtggtaacgcttatcaacacagcaaagtgaaccagtggaccacaaatgtagtagaacaaactttaagccaactcaccaagctgggaaaaccatttaaatacatcgtgacctgtgtaattatgcagaagaatggagctggattacacacagcaagttcctgcttctgggacagctctactgacgggagctgcactgtgcgatgggagaataagaccatgtactgcatcgtcagtgccttcggactgtctatttgacctgcagtccagcctatggcctttctccttttgtctctagttcatcctctaaccaccagccatgaattcagtgaactcttttctcattctctttgttttgtggcactttcacaatgtagaggaaaaaaccaaatgaccgcactgtgatgtgaatggcaccgaagtcagatgagtatccctgtaggtcacctgcagcctgcgttgccacttgtcttaactctgaatatttcatttcaaaggtgctaaaatctgaaatctgctagtgtgaaacttgctctactctctgaaatgattcaaatacactaattttccatactttatacttttgttagaataaattattcaaatctaaaaaaaaaaaaaaaaaaact

SEQ ID NO: 959 - DNA, 281 bp, Artificial Sequence
  Description of Artificial sequences:primer
  misc_feature (1)..(281): 3' terminal sequence from clone image:37630. tubulin, beta polypeptide(TUBB) gene.
  misc_feature (217)..(217): n is a, c, g, or t
ttttttttttccgacacaaacgtttatgtgattttagccattacaacagtaattcagaaatatctcaaatgttacattgatgtcatcaatattacaaaaaaggaaaaaaaagtgacaggcaacagtgaagagcaccagagacccagcgcacacctaaagtagaccatgcttctttccttccactgccaggttatcgtcccgggaagccccccacccnctcgctttcctcctccgctttccctaacccgtctcgcgggggcatctacgcctcgtcctcgccc

SEQ ID NO: 960 - DNA, 1812 bp, Artificial Sequence
  Description of Artificial sequences:primer
  misc_feature (1)..(1812): tubulin, beta polypeptide(TUBB) gene.
ggcacgagggggggctcgggctgggggcgcggcctgtgccggccgccccaccctccttgcataaaagccggagcccgcggggccggcgctctcagcccgtcggttcccgagcgccttcccggtgaccccgcagtgggtgtgtgaggggaggacggacagacccagacgccgccggaccaggaggacgctgacgaggcaccatgcgtgagatcgtgcacatccaggcgggccagtgcggcaaccagatcggcgccaagttttgggaggtcatcagtgatgagcatgggattgaccccactggcagttaccatggagacagtgatttgcagctggagagaatcaatgtttactacaatgaagccactggtaacaaatatgttcctcgggccatcctcgtggatctggagccaggcacgatggattcggttaggtctggaccattcggccagatcttcagaccagacaatttcgtgtttggccagagtggagccgggaataactgggccaagggccactacacagagggagccgagctggtcgactcggtcctggatgtggtgaggaaggagtcagagagctgtgactgtctccagggcttccagctgacccactctctggggggcggcacggggtccgggatgggcaccctgctcatcagcaagatccgggaagagtacccagaccgcatcatgaacaccttcagcgtcatgccctcacccaaggtgtcagacacggtggtggagccctacaacgccaccctctcggtccaccagctggtggaaaacacagatgaaacctactgcattgacaacgaggccctgtatgacatctgcttccgcaccctgaagctgaccacccccacctacggggacctcaaccacctggtgtcggccaccatgagcggggtcaccacctgcctgcgcttcccgggccagctgaacgcagacctgcgcaagctggcggtgaacatggtgcccttccctcgcctgcacttcttcatgcccggcttcgcgcccctgaccagccggggcagccagcagtaccgggcgctcacggtgcccgagctcacccagcagatgttcgactccaagaacatgatggccgcctgcgacccgcgccacggccgctacctgacggtggctgccatcttccggggccgcatgtccatgaaggaggtggacgagcagatgctcaacgtgcagaacaagaacagcagctacttcgtggagtggatccccaacaacgtgaagacggccgtgtgcgacatcccgccccgcggcctgaagatgtcggccaccttcatcggcaacagcacggccatccaggagctgttcaagcgcatctccgagcagttcacggccatgttccggcgcaaggccttcctgcactggtacacgggcgagggcatggacgagatggagttcaccgaggccgagagcaacatgaacgacctggtgtccgagtaccagcagtaccaggacgccacggccgacgaacaaggggagttcgaggaggaggagggcgaggacgaggcgtagatgcccccgcgagacgggttagggaaagcggaggaggaaagcgagggggtggggggcttcccgggacgataacctggcagtggaaggaaagaagcatggtctactttaggtgtgcgctgggtctctggtgctcttcactgttgcctgtcacttttttttccttttttgtaatattgatgacatcaatgtaacatttgagatatttctgaattactgttgtaatggctaaaatcacataaacgtttgtgtcggaaaaaaaaaaaaaaaaaaaaaa

SEQ ID NO: 961 - DNA, 424 bp, Artificial Sequence
  Description of Artificial sequences:primer
  misc_feature (1)..(424): 3' terminal sequence from clone image:376473. ras homolog enriched in brain(RHEB) gene.
  misc_feature (424)..(424): n is a, c, g, or t
tttttttgaggtttgcagctattttatttacaagtatacatttaacacaatgaaataaacactgatatactgaagcctagttaatagtagtgtaacaatatgcatcattttgatgattacattattttaaacaacaaactacactgaaaaattaatgccgataaaattcttggtcataatattaagaaatacaatatataaattgaaaatatgattgcttaaaatttgaaaatggaagtgaactcatttggacagactcagagttaacataatctgaagggaggggagctctgacccaaatgatatctttcaggttaacagaagaaaaaagaagcatagtttatcttcaaggagaacgggcagtttgcttcttcaggtagaatatattcccagtgtcctcaggctttgcagcagaatcacatcn

SEQ ID NO: 962 - DNA, 297 bp, Artificial Sequence
  Description of Artificial sequences:primer
  misc_feature (1)..(297): 5' terminal sequence from clone image:376473. ras homolog enriched in brain(RHEB) gene.
  misc_feature (19)..(19): n is a, c, g, or t
  misc_feature (153)..(153): n is a, c, g, or t
  misc_feature (276)..(276): n is a, c, g, or t
  misc_feature (282)..(282): n is a, c, g, or t
  misc_feature (288)..(288): n is a, c, g, or t
ccaagatgccgcagtccangtcccggaagatcgcgatcctgggctaccggtctgtggggaaatcctcattgacgattcaatttgttgaaggccaatttgtggactcctacgatccaaccatagaaaacacttttacaaagttgatcacagtanatggacaagaatatcatcttcaacttgtagacacagccgggcaagatgaatattctatctttcctcagacatactccatagatattaatggctatattcttgtgtattctgttacatcaatcnaaaggngatgtnttgaacgta

SEQ ID NO: 963 - DNA, 1396 bp, Artificial Sequence
  Description of Artificial sequences:primer
  misc_feature (1)..(1396): ras homolog enriched in brain(RHEB) gene.
gcgtaattaaaaggcggcggaagaaggtgggagggtcatgacgcagcgagtttcagtcgtgacttttctgggggcatcgcggcgtccccttttttttgcctttaaagtaaaacgtcgccccgacgcaccccccgcgtatttcggggggcggaggcggcgggccacggcgcgaagaggggcggtgctgacgccggccggtcacgtgggcgtgttgtgggggggaggggcgccgccgcgcggtcggttccgggcggttgggagcgcgcgagctagcgagcgagaggcagccgcgcccgccgccgcccctgctctgtatgccgctctctcccggcgcggccgccgccgatcacagcagcaggagccaccgccgccgcggttgatgtggttgggccggggctgaggaggccgccaagatgccgcagtccaagtcccggaagatcgcgatcctgggctaccggtctgtggggaaatcctcattgacgattcaatttgttgaaggccaatttgtggactcctacgatccaaccatagaaaacacttttacaaagttgatcacagtaaatggacaagaatatcatcttcaacttgtagacacagccgggcaagatgaatattctatctttcctcagacatactccatagatattaatggctatattcttgtgtattctgttacatcaatcaaaagttttgaagtgattaaagttatccatggcaaattgttggatatggtggggaaagtacaaatacctattatgttggttgggaataagaaagacctgcatatggaaagggtgatcagttatgaagaagggaaagctttggcagaatcttggaatgcagcttttttggaatcttctgctaaagaaaatcagactgctgtggatgtttttcgaaggataattttggaggcagaaaaaatggacggggcagcttcacaaggcaagtcttcatgctcggtgatgtgattctgctgcaaagcctgaggacactgggaatatattctacctgaagaagcaaactgcccgttctccttgaagataaactatgcttcttttttcttctgttaacctgaaagatatcatttgggtcagagctcccctcccttcagattatgttaactctgagtctgtccaaatgagttcacttccattttcaaattttaagcaatcatattttcaatttatatattgtatttcttaatattatgaccaagaattttatcggcattaatttttcagtgtagtttgttgtttaaaataatgtaatcatcaaaatgatgcatattgttacactactattaactaggcttcagtatatcagtgtttatttcattgtgttaaatgtatacttgtaaataaaatagctgcaaacctcaaaaaaaaaaaaaaaaaaa

SEQ ID NO: 964 - DNA, 471 bp, Artificial Sequence
  Description of Artificial sequences:primer
  misc_feature (1)..(471): 3' terminal sequence from clone image:376547. valosin-containing protein(VCP) gene.
  misc_feature (111)..(111): n is a, c, g, or t
  misc_feature (401)..(401): n is a, c, g, or t
tttatattaacaaaaagttttttttttttaatcaaagtacataaaataaaggtggacacaactgtaagtgatcaccaaccaggggatgtttgggatttttagatgcattanaagagagtatagagaatatccacctgcaagtaagattgtattcttttgcaaccctgcgattttcaaatggcaccccaacacagtctttggtcaggataagggatcctgcaggcctagccttaccgtccacatcaaatataggtggagggatgccatattctccacatttggagctctgtcaggctgctccctttccaccaagtcctatccagtgatactgcagacaaagggtgaggcaacaggagacatcataccgatgttgatcaggagaggaagaaggtgcaaatctnacttccaggatttcacatttggaagaatgccttgggagtggtgggtagcccaaggctgttcccaggaaaa

SEQ ID NO: 965 - DNA, 3198 bp, Artificial Sequence
  Description of Artificial sequences:primer
  misc_feature (1)..(3198): valosin-containing protein(VCP) gene.
ctgccactgccacctcgcggatcaggagccagcgttgttcgcccgacgcctcgctgccggtgggaggaagcgagagggaagccgcttgggctcttgtcgccgctgctcgcccaccgcctggaagagccgagccccggccagtcggtcgcttgccaccgctcgtagccgttacccgcgggccgccacagccgccggcgggagaggcgcgcgccatggcttctggagccgattcaaaaggtgatgacctatcaacagccattctcaaacagaagaaccgtcccaatcggttaattgttgatgaagccatcaatgaggacaacagtgtggtgtccttgtcccagcccaagatggatgaattgcagttgttccgaggtgacacagtgttgctgaaaggaaagaagagacgagaagctgtttgcatcgtcctttctgatgatacttgttctgatgagaagattcggatgaatagagttgttcggaataaccttcgtgtacgcctaggggatgtcatcagcatccagccatgccctgatgtgaagtacggcaaacgtatccatgtgctgcccattgatgacacagtggaaggcattactggtaatctcttcgaggtataccttaagccgtacttcctggaagcgtatcgacccatccggaaaggagacatttttcttgtccgtggtgggatgcgtgctgtggagttcaaagtggtggaaacagatcctagcccttattgcattgttgctccagacacagtgatccactgcgaaggggagcctatcaaacgagaggatgaggaagagtccttgaatgaagtagggtatgatgacattggtggctgcaggaagcagctagctcagatcaaagagatggtggaactgcccctgagacatcctgccctctttaaggcaattggtgtgaagcctcctagaggaatcctgctttacggacctcctggaacaggaaagaccctgattgctcgagctgtagcaaatgagactggagccttcttcttcttgatcaatggtcctgagatcatgagcaaattggctggtgagtctgagagcaaccttcgtaaagcctttgaggaggctgagaagaatgctcctgccatcatcttcattgatgagctagatgccatcgctcccaaaagagagaaaactcatggcgaggtggagcggcgcattgtatcacagttgttgaccctcatggatggcctaaagcagagggcacatgtgattgttatggcagcaaccaacagacccaacagcattgacccagctctacggcgatttggtcgctttgacagggaggtagatattggaattcctgatgctacaggacgcttagagattcttcagatccataccaagaacatgaagctggcagatgatgtggacctggaacaggtagccaatgagactcacgggcatgtgggtgctgacttagcagccctgtgctcagaggctgctctgcaagccatccgcaagaagatggatctcattgacctagaggatgagaccattgatgccgaggtcatgaactctctagcagttactatggatgacttccggtgggccttgagccagagtaacccatcagcactgcgggaaaccgtggtagaggtgccacaggtaacctgggaagacatcgggggcctagaggatgtcaaacgtgagctacaggagctggtccagtatcctgtggagcacccagacaaattcctgaagtttggcatgacaccttccaagggagttctgttctatggacctcctggctgtgggaaaactttgttggccaaagccattgctaatgaatgccaggccaacttcatctccatcaagggtcctgagctgctcaccatgtggtttggggagtctgaggccaatgtcagagaaatctttgacaaggcccgccaagctgccccctgtgtgctattctttgatgagctggattcgattgccaaggctcgtggaggtaacattggagatggtggtggggctgctgaccgagtcatcaaccagatcctgacagaaatggatggcatgtccacaaaaaaaaatgtgttcatcattggcgctaccaaccggcctgacatcattgatcctgccatcctcagacctggccgtcttgatcagctcatctacatcccacttcctgatgagaagtcccgtgttgccatcctcaaggctaacctgcgcaagtccccagttgccaaggatgtggacttggagttcctggctaaaatgactaatggcttctctggagctgacctgacagagatttgccagcgtgcttgcaagctggccatccgtgaatccatcgagagtgagattaggcgagaacgagagaggcagacaaacccatcagccatggaggtagaagaggatgatccagtgcctgagatccgtcgagatcactttgaagaagccatgcgctttgcgcgccgttctgtcagtgacaatgacattcggaagtatgagatgtttgcccagacccttcagcagagtcggggctttggcagcttcagattcccttcagggaaccagggtggagctggccccagtcagggcagtggaggcggcacaggtggcagtgtatacacagaagacaatgatgatgacctgtatggctaagtggtggtggccagcgtgcagtgagctggcctgcctggaccttgttccctgggggtggggcgcttgcccaggagagggaccaggggtgcgcccacagcctgctccattctccagtctgaacagttcagctacagtctgactctggacagggggtttctgttgcaaaaatacaaaacaaaagcgataaaataaaagcgattttcatttggtaggcggagagtgaattaccaacagggaattgggccttgggcctatgccatttctgttgtagtttggggcagtgcaggggacctgtgtggggtgtgaaccaaggcactactgccacctgccacagtaaagcatctgcacttgactcaatgctgcccgagccctcccttccccctatccaacctgggtaggtgggtaggggccacagttgctggatgtttatatagagagtaggttgatttattttacatgcttttgagttaatgttggaaaactaatcacaagcagtttctaaaccaaaaaatgacatgttgtaaaaggacaataaacgttgggtcaaaatggaaaaaaaaaaaaa

SEQ ID NO: 966 - DNA, 508 bp, Artificial Sequence
  Description of Artificial sequences:primer
  misc_feature (1)..(508): 3' terminal sequence from clone image:376696. interleukin 2 receptor, beta(IL2RB) gene.
  misc_feature (1)..(1): n is a, c, g, or t
  misc_feature (20)..(20): n is a, c, g, or t
  misc_feature (437)..(437): n is a, c, g, or t
  misc_feature (457)..(457): n is a, c, g, or t
  misc_feature (477)..(477): n is a, c, g, or t
ncaagaaaggggagtttatnttggatataaaggcaacaggaatcctgaccaaatggtcagcagccctctcagcagtaggtatttttgtattgggaacccaaggtcctctgcttagtggctcaacgcttgtctacctttccaaggctcaacgcttgtggagccttgtccacaagcacctgctcccaagggcctccctccctgagttcaaacgcccaagacagagttgatctgattggctagttcaggcccagcctacctgattggacagagcttggtgccaaaccccctcataggctgctggtcagagcctgtgggggcgtgtggtcaggtgcccaatcagctgtgagcaaggcctgtaagtgcaggtgcctgagggtcccaggtcagagttagctgggactggggtccctgtcctgctggggtggaatgttgtttgnccattgcacgtgtctgcctnggaaggtacgtggggggtcngggtagggggttgagcccttgaggaggggca

SEQ ID NO: 967 - DNA, 469 bp, Artificial Sequence
  Description of Artificial sequences:primer
  misc_feature (1)..(469): 5' terminal sequence from clone image:376696. interleukin 2 receptor, beta(IL2RB) gene.
  misc_feature (52)..(53): n is a, c, g, or t
  misc_feature (425)..(425): n is a, c, g, or t
  misc_feature (428)..(429): n is a, c, g, or t
gtcctgaccctggagttcttggagggacagggtgggaggcaggcagctgctnntcttgcgccgagcctcagaaggaccctgttgagggtcctcagtccactgctgaggacactcaatgtccagttgcagctggacttctccacccggatggcccccacccagtcctgcacacttggtccatccatttccaaacctccactgctgctcccgggtcctgctgcccgagccaggaactgtgtgtgttgcaggggggcagtaactccccaactccctcgttaatcacaggatcccacgaatttaggctcagaagcatcgctcctctccagccctgcagctattcaccaatatcagtcctcgcggctctccagggctccctgccctgacctcttccctgggttttctgccccagcctcctccttccctcnctnncgtccacagggcagctgaggtgtttccaaaccaatatggc

SEQ ID NO: 968 - DNA, 359 bp, Artificial Sequence
  Description of Artificial sequences:primer
  misc_feature (1)..(359): 3' terminal sequence from clone image:376755. transcriptional co-activator with pdz-binding motif (taz)(TAZ) gene.
  misc_feature (5)..(6): n is a, c, g, or t
  misc_feature (14)..(14): n is a, c, g, or t
  misc_feature (17)..(17): n is a, c, g, or t
  misc_feature (342)..(342): n is a, c, g, or t
  misc_feature (354)..(354): n is a, c, g, or t
gcganngccgcgcnctnaaggctcagcttcgctgcccgcccagaagatgaatccggcctcggcgccccctccgctcccgccgcctgggcagcaagtgatccacgtcacgcaggacctagacacagacctcgaagccctcttcaactctgtcatgaatccgaagcctagctcgtggcggaagaagatcctgccggagtctttctttaaggagcctgattcgggctcgcactcgcgccagtccagcaccgactcgtcgggcggccacccggggcctcgacttggctgggggtgcccagcattgtccgctcgcactcgtcgcccgcgtccctgcagctgggcacntggcgcgggtgntgcgg

SEQ ID NO: 969 - DNA, 426 bp, Artificial Sequence
  Description of Artificial sequences:primer
  misc_feature (1)..(426): 5' terminal sequence from clone image:376755. transcriptional co-activator with pdz-binding motif (taz)(TAZ) gene.
  misc_feature (32)..(32): n is a, c, g, or t
  misc_feature (52)..(52): n is a, c, g, or t
  misc_feature (230)..(230): n is a, c, g, or t
  misc_feature (258)..(258): n is a, c, g, or t
  misc_feature (317)..(317): n is a, c, g, or t
  misc_feature (356)..(356): n is a, c, g, or t
  misc_feature (372)..(372): n is a, c, g, or t
ctgagtggggcggttttgctggctcagggtantgggggccatctgctgctgntgttggtgattcatcacgagatttggctgggatactgccatggacctctgaggcactggtgtggaactgacggcagggtggaggttcatatgattcagaggctgattcatcgccttcctagggtcttgccatgtggtgattttttctatgtgattgaggaagtacctctggccagtgncgttgaaggtcatctcccagcccggggnaagtggcagctcgtcggtcacgtcgtaggactgctggcggaggtgcgcgtgctgctgcncggggctacccgagcacccgcgccggtgcccaactgcanggacgcgggcgacganttcgaacggacatgctgggcaaccccaaccagtcgaaggccccgggtgggcgcc

SEQ ID NO: 970 - DNA, 2024 bp, Artificial Sequence
  Description of Artificial sequences:primer
  misc_feature (1)..(2024): transcriptional co-activator with pdz-binding motif (taz)(TAZ) gene.
ggcacgagggcttctcctgcgcctccttttcgcccagcactagcgccttaggccagctcgggggatgtgagagccgaagcccttagactgccaggcacagagtcgggtcgggatttgtcagccaagcctcggctccagctccgcaatctcgggactcacccgagcgacccaggcccgacggcaagttcgggcgggacggcggccgccgcgcgctcaggctcagcttcgctgcccgcccagaagatgaatccggcctcggcgccccctccgctcccgccgcctgggcagcaagtgatccacgtcacgcaggacctagacacagacctcgaagccctcttcaactctgtcatgaatccgaagcctagctcgtggcggaagaagatcctgccggagtctttctttaaggagcctgattcgggctcgcactcgcgccagtccagcaccgactcgtcgggcggccacccggggcctcgactggctgggggtgcccagcatgtccgctcgcactcgtcgcccgcgtccctgcagctgggcaccggcgcgggtgctgcgggtagccccgcgcagcagcacgcgcacctccgccagcagtcctacgacgtgaccgacgagctgccactgcccccgggctgggagatgaccttcacggccactggccagaggtacttcctcaatcacatagaaaaaatcaccacatggcaagaccctaggaaggcgatgaatcagcctctgaatcatatgaacctccaccctgccgtcagttccacaccagtgcctcagaggtccatggcagtatcccagccaaatctcgtgatgaatcaccaacaccagcagcagatggcccccagtaccctgagccagcagaaccaccccactcagaacccacccgcagggctcatgagtatgcccaatgcgctgaccactcagcagcagcagcagcagaaactgcggcttcagagaatccagatggagagagaaaggattcgaatgcgccaagaggagctcatgaggcaggaagctgccctctgtcgacagctccccatggaagctgagactcttgccccagttcaggctgctgtcaacccacccacgatgaccccagacatgagatccatcactaataatagctcagatcctttcctcaatggagggccatatcattcgagggagcagagcactgacagtggcctggggttagggtgctacagtgtccccacaactccggaggacttcctcagcaatgtggatgagatggatacaggagaaaacgcaggacaaacacccatgaacatcaatccccaacagacccgtttccctgatttccttgactgtcttccaggaacaaacgttgacttaggaactttggaatctgaagacctgatccccctcttcaatgatgtagagtctgctctgaacaaaagtgagccctttctaacctggctgtaatcactaccattgtaacttggatgtagccatgaccttacatttcctgggcctcttggaaaaagtgatggagcagagcaagtctgcaggtgcaccacttcccgcctccatgactcgtgctccctcctttttatgttgccagtttaatcattgcctggttttgattgagagtaacttaagttaaacataaataaatattctattttcattttctgcaagcctgcgttcttgtgacagattatacagaattgtgtctgcaggattgattatgcagaatacttttctctttcttctctgctgccccatggctaagctttatgggtgttaattgaaatttatacaccaattgattttaaaccataaaaagctgaccacaggcagttacttctgagggcatcttggtccaggaaatgtgcacaaaattcgacctgatttacagtttcaaaaactgtattgatgacagtagtaccaaatgctttaaaaactatttaacttgagctttaaaaatcattgtatggatagtaaaattctactgtatggaatacaatgtaattttgaatccaaaaaaaaaaaaaaaaaaa

SEQ ID NO: 971 - DNA, 529 bp, Artificial Sequence
  Description of Artificial sequences:primer
  misc_feature (1)..(529): 3' terminal sequence from clone image:376769. hspc150 protein similar to ubiquitin-conjugating enzyme(HSPC150) gene.
  misc_feature (518)..(518): n is a, c, g, or t
ttttttttttttttttttttcaacattaaatgactatttatttttcaggtttaaaagatttcaaaatacatatgtacaagataaataaactacacaaaaattatgtcatcaaatatatttaaaaaaaaattcaaggtaggcaacttagatcaccttggcaaagaacacattaactaagatgaaccaggacaagtcccctaaacatcaggatgaaatttcttttctatgcctactagctgactggccttccttttctgtgttgagttgtgtactctggagtcaccagcctctggtagattatcaagcatctcttcctcatcagccttttgtttctgtcttgcatgcttctctgtccactgtctggcattcttgaggaaggctggcttattatatttaaattctgaggatatgtcagccatgagcgggtcatcagggttgggttctgacatgagcagctgaatagaggtcaacacagttgcgatgttgagggatggtcccaagcaccttttggtggcaanttgagacatcc

SEQ ID NO: 972 - DNA, 517 bp, Artificial Sequence
  Description of Artificial sequences:primer
  misc_feature (1)..(517): 5' terminal sequence from clone image:376769. hspc150 protein similar to ubiquitin-conjugating enzyme(HSPC150) gene.
  misc_feature (512)..(512): n is a, c, g, or t
gtgtcagctcagtgcatcccaggcagctcttagtgtggagcagtgaactgtgtgtggttccttctacttggggatcatgcagagagcttcacgtctgaagagagagctgcacatgttagccacagagccacccccaggcatcacatgttggcaagataaagaccaaatggatgacctgcgagctcaaatattaggtggagccaacacaccttatgagaaaggtgtttttaagctagaagttatcattcctgagaggtacccatttgaacctcctcagatccgatttctcactccaatttatcatccaaacattgattctgctggaaggatttgtctggatgttctcaaattgccaccaaaaggtgcttggagaccatccctcaacatcgcaactgtgttgacctctattcagctgctcatgtcagaacccaaccctgatgaccgctcatgctgacatatcctcagaatttaaatataataagccagcttcctcaagatgccagacagtgganaggga

SEQ ID NO: 973 - DNA, 928 bp, Artificial Sequence
  Description of Artificial sequences:primer
  misc_feature (1)..(928): hspc150 protein similar to ubiquitin-conjugating enzyme(HSPC150) gene.
gcgcgcagcgctggtaccccgttggtccgcgcgttgctgcgttgtgaggggtgtcagctcagtgcatcccaggcagctcttagtgtggagcagtgaactgtgtgtggttccttctacttggggatcatgcagagagcttcacgtctgaagagagagctgcacatgttagccacagagccacccccaggcatcacatgttggcaagataaagaccaaatggatgacctgcgagctcaaatattaggtggagccaacacaccttatgagaaaggtgtttttaagctagaagttatcattcctgagaggtacccatttgaacctcctcagatccgatttctcactccaatttatcatccaaacattgattctgctggaaggatttgtctggatgttctcaaattgccaccaaaaggtgcttggagaccatccctcaacatcgcaactgtgttgacctctattcagctgctcatgtcagaacccaaccctgatgacccgctcatggctgacatatcctcagaatttaaatataataagccagccttcctcaagaatgccagacagtggacagagaagcatgcaagacagaaacaaaaggctgatgaggaagagatgcttgataatctaccagaggctggtgactccagagtacacaactcaacacagaaaaggaaggccagtcagctagtaggcatagaaaagaaatttcatcctgatgtttaggggacttgtcctggttcatcttagttaatgtgttctttgccaaggtgatctaagttgcctaccttgaatttttttttaaatatatttgatgacataatttttgtgtagtttatttatcttgtacatatgtattttgaaatcttttaaacctgaaaaataaatagtcatttaatgttgaaaaaaaaaaaaaaaaaaaaaaaaaaaaaaa

SEQ ID NO: 974 - DNA, 412 bp, Artificial Sequence
  Description of Artificial sequences:primer
  misc_feature (1)..(412): 3' terminal sequence from clone image:376802. phospholipase c, delta 4(PLCD4) gene.
  misc_feature (17)..(17): n is a, c, g, or t
  misc_feature (47)..(47): n is a, c, g, or t
  misc_feature (88)..(88): n is a, c, g, or t
  misc_feature (91)..(91): n is a, c, g, or t
ctttgtggtccaccaantcatggttttaatccatactgggggcaganactatgtttccgggtgctggtgcctgaacttgccatgctgngtnttgtggtaatggattatgactggaaatcccgaaatgactttattggtcagtacaccctgccttggacctgcatgcaacaaggtgagccagcccctttgacccctggccaataccccagctctggctgccttcctaatgctgtcctcctgccccttccaggttaccgccacattcacctgctgtccaaagatggcatcagcctccgcccagcttccatctttgtgtatatctgcatccaggaaggccttggagggggatgagtcctcgaggtggggcatttcacgggaagggttggtatgctggctttagacggggagaaac

SEQ ID NO: 975 - DNA, 428 bp, Artificial Sequence
  Description of Artificial sequences:primer
  misc_feature (1)..(428): 5' terminal sequence from clone image:376802. phospholipase c, delta 4(PLCD4) gene.
  misc_feature (1)..(2): n is a, c, g, or t
  misc_feature (136)..(137): n is a, c, g, or t
  misc_feature (183)..(183): n is a, c, g, or t
  misc_feature (203)..(203): n is a, c, g, or t
  misc_feature (420)..(420): n is a, c, g, or t
nnagcatccttccagatgtttctccccgtctaaagccagcataccaacccttcccgtgaaatgcccacctcaggactcatccccctccaggccttcctggatgcagatatacacaaagatggaagctgggctgagnntgatgccatctttggacagcaggtgaatgtggcggtaacctggaangggcaggaggacagcattangaaggcagccagagctggggtattggccaggggtcaaaggggctggctcaccttgttgcatgcaggtccaaggcagggtgtactgaccaataaagtcatttcgggatttccagtcataatccattaccacaaaacgcagcatggcaagttcaggcaccagcacccggaaacatagtgtctgcccccagtatggattaaaacctgagttggtggacanaaagagta

SEQ ID NO: 976 - DNA, 3116 bp, Artificial Sequence
  Description of Artificial sequences:primer
  misc_feature (1)..(3116): phospholipase c, delta 4(PLCD4) gene.
ggcacgagggccagctgctgtagaagaggggaggaaacaagccagtgcaaggggagcaaaagagaaaaggagccaggctgggcttcctgatcccacagcatcgcagagctcgggaggcacagctcacagacacaggaaacacaggactgctattctgctctcctgcccacggtgatctggtgccagctggtggaacagtgggtgatggcgtccctgctgcaagaccagctgaccactgatcaggacttgctgctgatgcaggaaggcatgccgatgcgcaaggtgaggtccaaaagctggaagaagctaagatacttcagacttcagaatgacggcatgacagtctggcatgcacggcaggccaggggcagtgccaagcccagcttctcaatctctgatgtggagacaatacgtaatggccatgattccgagttgctgcgtagcctggcagaggagctccccctggagcagggcttcaccattgtcttccatggccgccgctccaacctggacctgatggccaacagtgttgaggaggcccagatatggatgcgagggctccagctgttggtggatcttgtcaccagcatggaccatcaggagcgcctggaccaatggctgagcgattggtttcaacgtggagacaaaaatcaggatggtaagatgagtttccaagaagttcagcggttattgcacctaatgaatgtggaaatggaccaagaatatgccttcagtctttttcaggcagcagacacgtcccagtctggaaccctggaaggagaagaattcgtacagttctataaggcattgactaaacgtgctgaggtgcaggaactgtttgaaagtttttcagctgatgggcagaagctgactctgctggaatttttggatttcctccaagaggagcagaaggagagagactgcacctctgagcttgctctggaactcattgaccgctatgaaccttcagacagtggcaaactgcggcatgtgctgagtatggatggcttcctcagctacctctgctctaaggatggagacatcttcaacccagcctgcctccccatctatcaggatatgactcaacccctgaaccactacttcatctgctcttctcataacacctacctagtgggggaccagctttgcggccagagcagcgtcgagggatatatacgggccctgaagcgggggtgccgctgcgtggaggtggatgtatgggatggacctagcggggaacctgtcgtttaccacggacacaccctgacctcccgcatcctgttcaaagatgtcgtggccacagtagcacagtatgccttccagacatcagactacccagtcatcttgtccctggagacccactgcagctgggagcagcagcagaccatggcccgtcatctgactgagatcctgggggagcagctgctgagcaccaccttggatggggtgctgcccactcagctgccctcgcctgaggagcttcggaggaagatcctggtgaaggggaagaagttaacacttgaggaagacctggaatatgaggaagaggaagcagaacctgagttggaagagtcagaattggcgctggagtcccagtttgagactgagcctgagccccaggagcagaaccttcagaataaggacaaaaagaagaaatccaagcccatcttgtgtccagccctctcttccctggttatctacttgaagtctgtctcattccgcagcttcacacattcaaaggagcactaccacttctacgagatatcatctttctctgaaaccaaggccaagcgcctcatcaaggaggctggcaatgagtttgtgcagcacaatacttggcagttaagccgtgtgtatcccagcggcctgaggacagactcttccaactacaacccccaggaactctggaatgcaggctgccagatggtggccatgaatatgcagactgcagggcttgaaatggacatctgtgatgggcatttccgccagaatggcggctgtggctatgtgctgaagccagacttcctgcgtgatatccagagttctttccaccctgagaagcccatcagccctttcaaagcccagactctcttaatccaggtgatcagcggtcagcaactccccaaagtggacaagaccaaagaggggtccattgtggatccactggtgaaagtgcagatctttggcgttcgtctagacacagcacggcaggagaccaactatgtggagaacaatggttttaatccatactgggggcagacactatgtttccgggtgctggtgcctgaacttgccatgctgcgttttgtggtaatggattatgactggaaatcccgaaatgactttattggtcagtacaccctgccttggacctgcatgcaacaaggttaccgccacattcacctgctgtccaaagatggcatcagcctccgcccagcttccatctttgtgtatatctgcatccaggaaggcctggagggggatgagtcctgaggtgggcatttcacgggaagggttggtatgctggctttagacggggagaaacatctggaaggatgctcgagagaacaaatggaggtggtgaaaatcaagctttggattgtgcattcctaggcacaaaattacctcattcttcctaacaagcaatctgggacctgattttccaccttttttctcttttcttcccttcctttgttttcataagcctttggtatctttcctgcccttttcctttgtgtactctatactggagttcccttcttcctcttgctgtaggctcaatcccataccgacatctacaactaatctttcccatcaactctgtgtgaaggcaggttgcaactagaaattcagaggggcttggaatagagaaacctaaagaagcatcatcccctccatccccaacttcctcaaagcccaaagccaagggaaggataaatcaaggctcaaggcttccccagcaaagattagggaaagagacttgaccccaggactgtactacgactcttaagagaacactgcacagcactcaaagtcccccactggactgcttcctccttagccccactggtataaatacatctctctccaatttggcaaaaaaaaaaaaaaaaaaa

SEQ ID NO: 977 - DNA, 427 bp, Artificial Sequence
  Description of Artificial sequences:primer
  misc_feature (1)..(427): 5' terminal sequence from clone image:377020. nuclear receptor subfamily 2, group f, member 6(NR2F6) gene.
  misc_feature (422)..(422): n is a, c, g, or t
gtaggaaatgtctttattattggccttgagtcatcatgtagtgtctgacataggttacgtgtccagaggatctgcctggcacacgctagctacccctgcccactggagcagcccctctggccgacgccaggcctttgtccatcatgccagggaagccaaccccaccatcccacaagttcatgctaggggtgctgaggaacaaggctgtcctacggattggaccctccatcctggacaggggtcctggggaggatgaggctgaggcctggatgatcagtctctttttggtttcatgatcatttaaaaaacagaaaagacaaacatttcacagtcttttaaaaaatagaagtctgaggagagaagccagagtcctggggccccgggaggcccctcgaaggcctcagcattccctgtcccttganggtct

SEQ ID NO: 978 - DNA, 1830 bp, Artificial Sequence
  Description of Artificial sequences:primer
  misc_feature (1)..(1830): nuclear receptor subfamily 2, group f, member 6(NR2F6) gene.
ggcacgagggtgcagcccgtgccccccgcgcgccggggccgaatgcgcgccgcgtagggtcccccgggccgagaggggtgcccggagggaagagcgcggtgggggcgccccggccccgctgccctggggctatggccatggtgaccggcggctggggcggccccggcggcgacacgaacggcgtggacaaggcgggcggctacccgcgcgcggccgaggacgactcggcctcgccccccggtgccgccagcgacgccgagccgggcgacgaggagcggccggggctgcaggtggactgcgtggtgtgcggggacaagtcgagcggcaagcattacggtgtcttcacctgcgagggctgcaagagctttttcaagcgaagcatccgccgcaacctcagctacacctgccggtccaaccgtgactgccagatcgaccagcaccaccggaaccagtgccagtactgccgtctcaagaagtgcttccgggtgggcatgaggaaggaggcggtgcagcgcggccgcatcccgcactcgctgcctggtgccgtggccgcctcctcgggcagccccccgggctcggcgctggcggcagtggcgagcggcggagacctcttcccggggcagccggtgtccgaactgatcgcgcagctgctgcgcgctgagccctaccctgcggcggccggacgcttcggcgcagggggcggcgcggcgggcgcggtgctgggcatcgacaacgtgtgcgagctggcggcgcggctgctcttcagcaccgtggagtgggcgcgccacgcgcccttcttccccgagctgccggtggccgaccaggtggcgctgctgcgcctgagctggagcgagctcttcgtgctgaacgcggcgcaggcggcgctgcccctgcacacggcgccgctactggccgccgccggcctccacgccgcgcctatggccgccgagcgcgccgtggctttcatggaccaggtgcgcgccttccaggagcaggtggacaagctgggccgcctgcaggtcgactcggccgagtatggctgcctcaaggccatcgcgctcttcacgcccgacgcctgtggcctctcagacccggcccacgttgagagcctgcaggagaaggcgcaggtggccctcaccgagtatgtgcgggcgcagtacccgtcccagccccagcgcttcgggcgcctgctgctgcggctccccgccctgcgcgcggtccctgcctccctcatctcccagctgttcttcatgcgcctggtggggaagacgcccattgagacactgatcagagacatgctgctgtcggggagtaccttcaactggccctacggctcgggccagtgaccatgacggggccacgtgtgctgtggccaggcctgcagacagacctcaagggacagggaatgctgaggcctcgaggggcctcccggggcccaggactctggcttctctcctcagacttctattttttaaagactgtgaaatgtttgtcttttctgttttttaaatgatcatgaaaccaaaaagagactgatcatccaggcctcagcctcatcctccccaggacccctgtccaggatggagggtccaatcctaggacagccttgttcctcagcacccctagcatgaacttgtgggatggtggggttggcttccctggcatgatggacaaaggcctggcgtcggccagaggggctgctccagtgggcaggggtagctagcgtgtgccaggcagatcctctggacacgtaacctatgtcagacactacatgatgactcaaggccaataataaagacatttcctacctgcaaaaaaaaaaaaaaaaaa

SEQ ID NO: 979 - DNA, 253 bp, Artificial Sequence
  Description of Artificial sequences:primer
  misc_feature (1)..(253): 3' terminal sequence from clone image:377545. myotrophin(MTPN) gene.
ctggtagtcggatttgttatgaatttctctctcccctcacccctcttaaagtatttagctgaagaagctggcagatagagagtgacagacagacaggcagcagtgtgaggccacaggagagtcattcttccggagttatcagtccatccatccatcactggagaagagctttgattgcctggttgtcagtggcttcaaaggcggtcagtccatctgggcctttcacagtcttatcagcaccctttgacagaag

SEQ ID NO: 980 - DNA, 3770 bp, Artificial Sequence
  Description of Artificial sequences:primer
  misc_feature (1)..(3770): myotrophin(MTPN) gene.
cggacgcgtgggctgctgggcccggtggccgcaaaagaactttctttctcccgcccgaacggtcgccgcggccaactgcctcgcccgcctggcagcctaaccctccttctcttcttctcctctccggcttcgcgcggccctgcctccctctcgcccggcggcatccgcttgctgctgccaccgcctcctcatcttctgcccggccaaccggcctgccccgctgcagtgatgtgcgacaaggagttcatgtgggccctgaaaaacggagacttggatgaggtgaaagactatgtggccaagggagaagatgtcaaccggacactagaaggtggaaggaaacctcttcattatgcagcagattgtgggcagcttgaaatcctggaatttctgctgctgaaaggagcagatattaatgctccagataaacatcatattactcctcttctgtctgctgtctatgagggtcatgtttcctgtgtgaaattgcttctgtcaaagggtgctgataagactgtgaaaggcccagatggactgaccgcctttgaagccactgacaaccaggcaatcaaagctcttctccagtgatggatggatggactgataactccggaagaatgactctcctgtggcctcacactgctgcctgtctgtctgtcactctctatctgccagcttcttcagctaaatactttaagaggggtgaggggagagagaaattcataacaaatccgactaccagaaaaaaaaaattgttttggaggaggggcaaaaggaaccatgatcaggcttttactgggattcctgatcaagtaagcctcttccctttctaataaaatatacaccttatacccaagggagagcaaagacaaaatacaccagtaacatttgaccttttcagctccctagctaatttattagattgtgttgaaggtctgattctacaaaggccaactctacatatttggtagccctaactgtctgagcagtagtggctgctgtgatgtaaacttagggtgctgagataagcaattagctctagccttctgccttaagaatgcactctactggggatttcctggcatagttaagagcgctgcctataaggttggtgaccaaatctttcctcggtgactttaagctttatgtgaaagcttagttaaggtgaggaggggcacactcctaaattgctggatgactgaactttggattttctctcccctttcacatggatttcatgtctctttagataaaactgactagttttatttataaaatcttaagttttggaagtctaaaggagaaaccattccagtatgcatatttttttctcctctagattcatacatttatatagcattgaaacactttcaaactcctgctggtagtaaaaggggatttaaaaatagaatcatagccataagcctgttagtatcatatgaagagagaacagttatcttagtacctatggattttctttatttgctgtttgaatggattgaccttggttatgtgttgagaattaaggaacattctttgaaatgcctctctcagacccatcttggaggctgattacttactgcaccaaagctatcactggggtgagatttactgtttggacaaatttagccccatcccttcaaaaatacacttgtaaccaggtttcccagagttgttgataggcttctgctgaacatatgccaacccacctgcataatatatttttgttgcttttataaatcatgcattacataaagtgtgacaacttcaaaatgtattctctgttcttggaatacagtgccctaaaatggtgttcttatgacctgcagaaaatatttacacatatttccaaatatttatttcatgagcagtacagctaattaaaatatataagcttaaattttatatcttacatttaaaatattaagattcctttgacttgccatccatataagcttgctaaaaatattaagaccaagtcatgcaataattgaatgtacctcaaatttttaggggagggtgggttagggactgatactcagattgtggataataattgaattggtttttaaaggcaacatagcattctacagcagggttaatctattatcaagaacagtcaccctggttaataacaagttttactgatcagttgctggttggttggttggttggcatgtgggtgtgtgggtgtataggtgtgtgtgggtgtgtgtgtgtatttttccccatgagtcctttttttaatcctgtggctttttcacttacaactagcctaaccctgtaattttcctacatccaagaaaacaatcacaaagtagtggtttaaatactttgttgtatttggctaattttgctgtcttaatgcagcctattaagagttgggttaaaaatcagtaatcagtactttattacatcactgaactaaaatatggagacatcctcattgaaaatggagggcactctatcagtctataactatcaacgtagtgcaacagggtgttttgatacctttgttttcacctcttgacataatgctatttaaaggcttgaatttttccctttatataattttcacctttactttcaaagtgttttgttgtagttggctattgcagagagtgcattgtcctatcattcctaaacctggtctgctttctacattcatggtatggaaaccatgtgattctttgtacagtttatcctgatgttgcttgtaatgcagtagaggctatttcgccttcgcttttctttctcgacctttttgtaaaccctataattatgaagcgattgcttgagaaaataacatataaacatagaatagaatagactgaccaagatggttcacagtttctttttttaactaggttatttataatgtatttctgaaccacttggcagacaaattcacaacacttaatgttcatattttgagtaaaggaagctaaaaccatgtttgctttctggtactacatgcattagcgaaaggttaagtaagttttgttctccactgaagtaatacttaacatctcagaaaaaattttgcatgttctgtagttttgtattaaatcagtcatttcatatgcactatatcaagtacaaacaggtagtttacctgtttatagtagtgtactaacaaagtctcccttgcagcttcagactgttatctataggcttatcgttcaaatacagcacttgaatatcccaagtagttcttctacgcatagctcacctttctaaacccagttaagcatggaagagaggtagtaggtaggtgcagtgtgtggaagctgcaaacaagtaggccttttattcattgatatcttttcccaagtactggattttaaatctgtatgtatctgtttgatttttttttctaatatttcagttgagctgctgttttcttccatgcaatattgtatactcaattgtgtatagaagaagctggtgagagtgccctcctacataaataagcaattgcagtgttttgcatgcaaaatataaaaaatttaaattgtcctgattctattttgtaaatggagaaacaatcatatctttctaagcggtaatggaggaagactagtgctttgtgcattttgatatatttgagttcattttttccacaatgtcatacttttgacgcagttgggtttctcataagtatcctagttcatgtacatccgaatgctaaataatactgtgttttaagttttgtgttgcaagaacaaatggaataaacttgaattgtgctacgaaaaaaaaaaaaaaaaaaa

SEQ ID NO: 981 - DNA, 528 bp, Artificial Sequence
  Description of Artificial sequences:primer
  misc_feature (1)..(528): 3' terminal sequence from clone image:378813. secretory leukocyte protease inhibitor (antileukoproteinase)(SLPI) gene.
aggctcgtttatttattcattgatcaactggcacttcttgaaagcctgctgtgtgccaagcctttccccaaaggaggatatcagtggtggagccaagtctcagggtggaaaggacctggaccacacagagcaggactccagagcctcctccatatggcaggaatcaagctttcacaggggaaacgcaggatttcccacacatgcccatgcaacacttcaagtcacgcttgcactggccatccatctcacagaaattgggggggttaagcatcaaacattggccataagtcactgggcacttcccaggcttcctccttgttgggtttggggtgtcaacaggatccaggcatttgatgccacaagtgtcaggacaacatctcttcttccctggacactgccagtcactctggcactcaggtttcttgtatctaaggcactgggcagatttcttaggaggacagactccagctttgaaggactttccagagccttccacagcccaaggtgccagagttcccagggcaagca

SEQ ID NO: 982 - DNA, 431 bp, Artificial Sequence
  Description of Artificial sequences:primer
  misc_feature (1)..(431): 3' terminal sequence from clone image:38056. karyopherin alpha 1 (importin alpha 5)(KPNA1) gene.
  misc_feature (328)..(328): n is a, c, g, or t
  misc_feature (415)..(415): n is a, c, g, or t
tttttttttgggttttttcatccttagttttttttattaaattacaggatatggttttcgattactaagtattcgaaatcctcataccagcaacagaaatgaaccacttccaaattctaagacacaaaagaccaaagagaagcaaaagcgatacaaattaatatgtgcccctctcctttctgctctaagggaatctacaaaccagtatcacatttaggagtcaaagtgttaattcttcaggcattcctgacaactaggaaaggcacattcactggaagggctgaagggtgagggagtgggatgggtttaactttaatatctggaaggntgggcgccaatagggggaaaggaaaaccatccaattcttcggtaggggtttaatggcaatctgggctaggaaaaggccacccggggnattcccaggggtttca

SEQ ID NO: 983 - DNA, 414 bp, Artificial Sequence
  Description of Artificial sequences:primer
  misc_feature (1)..(414): 5' terminal sequence from clone image:38056. karyopherin alpha 1 (importin alpha 5)(KPNA1) gene.
  misc_feature (378)..(378): n is a, c, g, or t
aaatagggcacagatccagactgtgatagatgccaacattttcccagccctcattagtattttacaaactgctgaatttcggacaagaaaagaagcagcttgggccatcacaaatgcaacttctggaggatcagctgaacagatcaagtacctagtagaactgggttgtatcaagccgctctgtgatctcctcacggtcatggactctaagattgtacaggttgccctaaatggcttggaaaatatcctgaggcttggagaacaggaagccaaaaggaatgggcactggcattaacccttactgtgctttgattgaaggaagcttatggtctgggataaaattgagttctttacagagttcatggaaaaccagggagntcttacccaaaagggccttttgatcttatttgaggc

SEQ ID NO: 984 - DNA, 2940 bp, Artificial Sequence
  Description of Artificial sequences:primer
  misc_feature (1)..(2940): karyopherin alpha 1 (importin alpha 5)(KPNA1) gene.
ctaacttcagcggtggcaccgggatcggttgccttgagcctgaaatatgaccaccccaggaaaagagaactttcgcctgaaaagttacaagaacaaatctctgaatcccgatgagatgcgcaggaggagggaggaagaaggactgcagttacgaaagcagaaaagagaagagcagttattcaagcggagaaatgttgctacagcagaagaagaaacagaagaagaagttatgtcagatggaggctttcatgaggctcagattagtaacatggagatggcaccaggtggtgtcatcacttctgacatgattgagatgatattttccaaaagcccagagcaacagctttcagcaacacagaaattcaggaagctgctttcaaaagaacctaaccctcctattgatgaagttatcagcacaccaggagtagtggccaggtttgtggagttcctcaaacgaaaagagaattgttcactgcagtttgaatcagcttgggtactgacaaatattgcttcaggaaattctcttcagacccgaattgtgattcaggcaagagctgtgcccatcttcatagagttgctcagctcagagtttgaagatgtccaggaacaggcagtctgggctcttggcaacattgctggagatagtaccatgtgcagggactatgtcttagactgcaatatccttccccctcttttgcagttattttcaaagcaaaaccgcctgaccatgacccggaatgcagtatgggctttgtctaatctctgtagagggaaaagtccacctccagaatttgcaaaggtttctccatgtctgaatgtgctttcctggttgctgtttgtcagtgacactgatgtactggctgatgcctgctgggccctctcatatctatcagatggacccaatgataaaattcaagcggtcatcgatgcgggagtatgtaggagacttgtggaactgctgatgcataatgattataaagtggtttctcctgctttgcgagctgtgggaaacattgtcacaggggatgatattcagacacaggtaattctgaattgctcagctctgcagagtttattgcatttgctgagtagcccaaaggaatctatcaaaaaggaagcatgttggacgatatctaatattacagctggaaatagggcacagatccagactgtgatagatgccaacattttcccagccctcattagtattttacaaactgctgaatttcggacaagaaaagaagcagcttgggccatcacaaatgcaacttctggaggatcagctgaacagatcaagtacctagtagaactgggttgtatcaagccgctctgtgatctcctcacggtcatggactctaagattgtacaggttgccctaaatggcttggaaaatatcctgaggcttggagaacaggaagccaaaaggaacggcactggcattaacccttactgtgctttgattgaagaagcttatggtctggataaaattgagttcttacagagtcatgaaaaccaggagatctaccaaaaggcctttgatcttattgagcattacttcgggaccgaagatgaagacagcagcattgcaccccaggttgaccttaaccagcagcagtacatcttccaacagtgtgaggctcctatggaaggtttccagctttgaagcaatactctgctttcacgtacctgtgctcagaccaggctacccagtcgagtcctcttgtggagcccacagtcctcatggagctaacttctcaaatgttttccataatactgtttgcgctcatttgcttgccttgcgcacctgctctcttacacacatctggaaaacctccggctctctgtggtgggatacccttctaataaaagggtaaccagaacggcccactctcttttacggaaaaatccctaggctttggagatccgcacttacattagagttatgggaatatacacatattaatgtggctccctttttcttgtgggggaataaaagaggactcctcctcattccctttaacatgggggaaaaaactgacattaaaagatgagactaaatctttatcttgaattttacacaactacttacgacaagggagatgtttagacctgttggtatacttcagagtacttttcatgagttcttccacagtgaacccttggattacctggtggctttttctagccagattgcattaatccttactgagattggatggttttctttcctctattggcgccattcttcagatattaaagttaaaccatccactccctcaccttcagccttcagtgaatgtgctttctagttgtcaggaatgctgaagaattaacactttgactcctaaatgtgatactggtgggtaagagcagggcacatttaatttgttcgcttttgcttctctttggtctgggcacatttaatttgttcgcttttgcttctctttggtcttttcgaatacttagtaatcgaaaaccatatcctgtaatttaataaaaaaaactaaggacgaaaaaacccctccaattttcccaaatgcaatcagtgtaactaggggctgtgtttctgcattaaaataaatgtttcaggctttgtggtcctgatcaaggtcctcattaaaaaattggagttcaccctaggcttttcccctctgtgactggcagataacacatacttttgaaagtaactttgggattttttttcttaggtgcagctcgattctaatcttttcatgctgcacacgattcctttaatcgatagcatccttatctgaaagaaataaccatcttctcaacatgacctgcttaacccaaataagaacagtgatcttataacctcattgtttcctaatctattttatttcatctcctgctagtactgtgccgcttccccctccccccacacaaaataaaaacagtatctcgcttctggctcatttt

SEQ ID NO: 985 - DNA, 430 bp, Artificial Sequence
  Description of Artificial sequences:primer
  misc_feature (1)..(430): 3' terminal sequence from clone image:383433. laminin receptor 1 (ribosomal protein sa, 67kda)(LAMR1) gene.
  misc_feature (20)..(20): n is a, c, g, or t
  misc_feature (23)..(23): n is a, c, g, or t
  misc_feature (34)..(34): n is a, c, g, or t
  misc_feature (64)..(64): n is a, c, g, or t
  misc_feature (67)..(67): n is a, c, g, or t
  misc_feature (90)..(90): n is a, c, g, or t
  misc_feature (92)..(92): n is a, c, g, or t
  misc_feature (232)..(232): n is a, c, g, or t
  misc_feature (296)..(297): n is a, c, g, or t
  misc_feature (299)..(299): n is a, c, g, or t
  misc_feature (410)..(410): n is a, c, g, or t
ccatttttccatgctgcttnagngcctatgcaanaacagcttaagaccagtcagtggttgctcntanccatttcagtggcctgagcagtngnagctgcagaccagtcttccgtggcaggctgagcgctccagtcttcagtagggaattgctgaataggcacagagggcacctgtacaccttcagaccagtctgcaacctcaggctgagtagcagtgaactcaggagcggganaagtccattcaccctgaaattcctccttggtcactgccttctcagcagcagcctgctcttcttnngncaatctcttcaggatctctgtagaaggtacagatcaggcatgacctcccatgggtgtttcacgggaaatgggtgccacgcatgcgcagaactttcccgagccagcatccancacatcaaacccactgagtg

SEQ ID NO: 986 - DNA, 285 bp, Artificial Sequence
  Description of Artificial sequences:primer
  misc_feature (1)..(285): 5' terminal sequence from clone image:383433. laminin receptor 1 (ribosomal protein sa, 67kda)(LAMR1) gene.
  misc_feature (98)..(98): n is a, c, g, or t
  misc_feature (186)..(186): n is a, c, g, or t
  misc_feature (278)..(278): n is a, c, g, or t
  misc_feature (283)..(283): n is a, c, g, or t
acctgcagaggggtccatacggcgttgttctggattcccgtcgtaacttaaagggaaattttcacaatgtccggagcccttgatgtcctgcaaatganggaggaggatgtccttaagttccttgcagcaggaacccacttaggtggcaccaatcttgacttccagatggaacagtacatctataanaggaaaagtgatggcatctatatcataaatctcaagaggacctgggagaagcttctgctggcagctccgtgcaattgttgccatttgaaaancctgntg

SEQ ID NO: 987 - DNA, 1039 bp, Artificial Sequence
  Description of Artificial sequences:primer
  misc_feature (1)..(1039): laminin receptor 1 (ribosomal protein sa, 67kda)(LAMR1) gene.
tgcctgtcttttccgtgctacctgcagaggggtccatacggcgttgttctggattcccgtcgtaacttaaagggaaactttcacaatgtccggagcccttgatgtcctgcaaatgaaggaggaggatgtccttaagttccttgcagcaggaacccacttaggtggcaccaatcttgacttccagatggaacagtacatctataaaaggaaaagtgatggcatctatatcataaatctcaagaggacctgggagaagcttctgctggcagctcgtgcaattgttgccattgaaaaccctgctgatgtcagtgttatatcctccaggaatactggccagagggctgtgctgaagtttgctgctgccactggagccactccaattgctggccgcttcactcctggaaccttcactaaccagatccaggcagccttccgggagccacggcttcttgtggttactgaccccagggctgaccaccagcctctcacggaggcatcttatgttaacctacctaccattgcgctgtgtaacacagattctcctctgcgctatgtggacattgccatcccatgcaacaacaagggagctcactcagtgggtttaatgtggtggatgctggctcgggaagttctgcgcatgcgtggcaccatttcccgtgaacacccatgggaggtcatgcctgatctgtacttctacagagatcctgaagagattgaaaaagaagagcaggctgctgctgagaaggcagtgaccaaggaggaatttcagggtgaatggactgctcccgctcctgagttcactgctactcagcctgaggttgcagactggtctgaaggtgtacaggtgccctctgtgcctattcagcaattccctactgaagactggagcgctcagcctgccacggaagactggtctgcagctcccactgctcaggccactgaatgggtaggagcaaccactgactggtcttaagctgttcttgcataggctcttaagcagcatggaaaaatggttgatggaaaataaacatcagtttct

SEQ ID NO: 988 - DNA, 449 bp, Artificial Sequence
  Description of Artificial sequences:primer
  misc_feature (1)..(449): 3' terminal sequence from clone image:39593. somatostatin(SST) gene.
  misc_feature (113)..(113): n is a, c, g, or t
  misc_feature (423)..(423): n is a, c, g, or t
  misc_feature (429)..(429): n is a, c, g, or t
  misc_feature (444)..(444): n is a, c, g, or t
ttttttttttttttcataatttcaccataattttattttgtatttacagttttcagtttctaatgcaagggtctcgctgaagacttggaggattagggaagagagatggggtntgggggcgagggatcagaggtctgatatggacaatactagttaagaaagctaacaggatgtgaaagtcttccagaagaaattcttgcagccagctttgcgtttctcggggtgccatagccgggtttgagttagcagatctctgcagctcaagcctcatttcatcctgctcagcagcctggggacagatcttcaggttccaggggcatcattctccgtctggttgggttcagacagcagctctgccaagaagtacttggccagttcctgtataggggcagaagggataggaaaaagagagaaagagaagtnggggangacaatgggaaaaanttttg

SEQ ID NO: 989 - DNA, 351 bp, Artificial Sequence
  Description of Artificial sequences:primer
  misc_feature (1)..(351): somatostatin(SST) gene.
atgctgtcctgccgcctccagtgcgcgctggctgcgctgtccatcgtcctggccctgggctgtgtcaccggcgctccctcggaccccagactccgtcagtttctgcagaagtccctggctgctgccgcggggaagcaggaactggccaagtacttcttggcagagctgctgtctgaacccaaccagacggagaatgatgccctggaacctgaagatctgtcccaggctgctgagcaggatgaaatgaggcttgagctgcagagatctgctaactcaaacccggctatggcaccccgagaacgcaaagctggctgcaagaatttcttctggaagactttcacatcctgttag

SEQ ID NO: 990 - DNA, 363 bp, Artificial Sequence
  Description of Artificial sequences:primer
  misc_feature (1)..(363): 3' terminal sequence from clone image:39821. atp-binding cassette, sub-family a (abc1), member 5(ABCA5) gene.
  misc_feature (308)..(308): n is a, c, g, or t
  misc_feature (329)..(329): n is a, c, g, or t
tttttttttttatcttttctatgcattagttatgaattagttttttatttagattggaacattacgtacttatttaagaagatggcataaacttaaagataacttaaaaataaaactattctattacaattcctttaaatcacaaattcagaagcactgtttctgaatggtgaaaaagatgacatacaaactatatagttcaatatacttcaatacaaacatggcagcttcacttaattatacatacgttttatttaaagaaaagcaaaacacacaaccacagcatttcaattaaggagcttaggaanaatttcaagtgcgttcttggntctccagttaccattccagttagaagacttttta

SEQ ID NO: 991 - DNA, 439 bp, Artificial Sequence
  Description of Artificial sequences:primer
  misc_feature (1)..(439): 5' terminal sequence from clone image:39821. atp-binding cassette, sub-family a (abc1), member 5(ABCA5) gene.
  misc_feature (305)..(305): n is a, c, g, or t
  misc_feature (361)..(361): n is a, c, g, or t
  misc_feature (435)..(435): n is a, c, g, or t
ttcttattttgatgctaggaagcttattggcatttcattatggattatatttttatactgtaaagttccttgctgtggttttttgccttattggttatgttccatcagttattctgttcacttatattgcttctttcacctttaagaaaattttaaataccaaagaattttggtcatttatctattctgtggcagcgttggcttgtattgcaatcactgaaataactttctttatgggatacacaattgcaactattcttcattatgccttttgtatcatcattccaatctatccacttctaggntgcctgatttctttcataaagatttcttgggaggaatgtacggaaaaaatgtgggncacctataatccatggggatagggctttcagtaggctgttattatcgccttacccgccgtgttgtaccgtgggntttt

SEQ ID NO: 992 - DNA, 7044 bp, Artificial Sequence
  Description of Artificial sequences:primer
  misc_feature (1)..(7044): atp-binding cassette, sub-family a (abc1), member 5(ABCA5) gene.
tttttgtatttttagtagagacagggtttcaccatgttggtcaggctggtctcaaactcctgacttcgtgatctgcccaccttggcctcccaaagtgctgggattacaggcgtgagccaccgcacccggtcagctattttctacatgcttcatttgcagtgtaatattggattgtatgagactttgggttttgtgttaatacctacagaaaatgttgatattttctcttagcaggctgtcaaccaggttaggttcaggtcataagtttctacccacattctttgaactgtagttgtcattttagtttatttttcaaaaacttttgcagtacctttttggtctgtcttgtgtgtgccttgcagtgaacagtctggatttggacagtggtctgtctgttagttcagtttctcaagcctttgtcacactaataggattggatttatgtatgtccagcttgggaattattacaggaattaaaaacaactttttagagtgctttcctgagctctctttctatttgttcccccttctactttttgcttccctgtggctgctgtttctatcctccagccagagagctagtgtttattttctccattgtgttacacacttgtgcagctgcaaccaccatatccagggcccaatggtaggaggtagagaagaaaagcaaaagggattggcctcatcctcttacaacgatagttccattgaatagagagaaaggttttcctgcctcagagtgttggctgcactaggcttttgttactgtagtctggccctgttaccatgggattgcttgcatgtggggatacaggagaattcagaaaagaaaaaaagatttgctatttctacattctccctgagcattaagacttcccttgcccattcctcaattcaaagctaaggcttcttctggagctgcctctgtgggcggttcgggagataccaaaggagaaaaagtaccactgttgatatggtggtatttcaaattctggtctaccctatttcacatgccttgtttacttttcagagctgacagattgctgctccatgcattctgtccagtttcctaagagagacagcttggagtatgcttaatccatcttacctgggactgaaacagctgcttattttgccgttaaaaattacatgcagtttactgcgtggctccgggtttgtttgtttgtttttcctctttaataggtttattcagaaaacatgtccactgcaattagggaggtaggagtttggagacagaccagaacacttctactgaagaattacttaattaaatgcagaaccaaaaagagtagtgttcaggaaattctttttccactattttttttattttggttaatattaattagcatgatgcatccaaataagaaatatgaagaagtgcctaatatagaactcaatcctatggacaagtttactctttctaatctaattcttggatatactccagtgactaatattacaagcagcatcatgcagaaagtgtctactgatcatctacctgatgtcataattactgaagaatatacaaatgaaaaagaaatgttaacatccagtctctctaagccgagcaactttgtaggtgtggttttcaaagactccatgtcctatgaacttcgtttttttcctgatatgattccagtatcttctatttatatggattcaagagctggctgttcaaaatcatgtgaggctgctcagtactggtcctcaggtttcacagttttacaagcatccatagatgctgccattatacagttgaagaccaatgtttctctttggaaggagctggagtcaactaaagctgttattatgggagaaactgctgttgtagaaatagatacctttccccgaggagtaattttaatatacctagttatagcattttcaccttttggatactttttggcaattcatatcgtagcagaaaaagaaaaaaaaataaaagaatttttaaagataatgggacttcatgatactgccttttggctttcctgggttcttctatatacaagtttaatttttcttatgtcccttcttatggcagtcattgcgacagcttctttgttatttcctcaaagtagcagcattgtgatatttctgctttttttcctttatggattatcatctgtattttttgctttaatgctgacacctctttttaaaaaatcaaaacatgtgggaatagttgaattttttgttactgtggcttttggatttattggccttatgataatcctcatagaaagttttcccaaatcgttagtgtggcttttcagtcctttctgtcactgtacttttgtgattggtattgcacaggtcatgcatttagaagattttaatgaaggtgcttcattttcaaatttgactgcaggcccatatcctctaattattacaattatcatgctcacacttaatagtatattctatgtcctcttggctgtctatcttgatcaagtcattccaggggaatttggcttacggagatcatctttatattttctgaagccttcatattggtcaaagagcaaaagaaattatgaggagttatcagagggcaatgttaatggaaatattagttttagtgaaattattgagccagtttcttcagaatttgtaggaaaagaagccataagaattagtggtattcagaagacatacagaaagaagggtgaaaatgtggaggctttgagaaatttgtcatttgacatatatgagggtcagattactgccttacttggccacagtggaacaggaaagagtacattgatgaatattctttgtggactctgcccaccttctgatgggtttgcatctatatatggacacagagtctcagaaatagatgaaatgtttgaagcaagaaaaatgattggcatttgtccacagttagatatacactttgatgttttgacagtagaagaaaatttatcaattttggcttcaatcaaagggataccagccaacaatataatacaagaagtgcagaaggttttactagatttagacatgcagactatcaaagataaccaagctaaaaaattaagtggtggtcaaaaaagaaagctgtcattaggaattgctgttcttgggaacccaaagatactgctgctagatgaaccaacagctggaatggacccctgttctcgacatattgtatggaatcttttaaaatacagaaaagccaatcgggtgacagtgttcagtactcatttcatggatgaagctgacattcttgcagataggaaagctgtgatatcacaaggaatgctgaaatgtgttggttcttcaatgttcctcaaaagtaaatgggggatcggctaccgcctgagcatgtacatagacaaatattgtgccacagaatctctttcttcactggttaaacaacatatacctggagctactttattacaacagaatgaccaacaacttgtgtatagcttgcctttcaaggacatggacaaattttcaggtttgttttctgccctagacagtcattcaaatttgggtgtcatttcttatggtgtttccatgacgactttggaagacgtatttttaaagctagaagttgaagcagaaattgaccaagcagattatagtgtatttactcagcagccactggaggaagaaatggattcaaaatcttttgatgaaatggaacagagcttacttattctttctgaaaccaaggctgctctagtgagcaccatgagcctttggaaacaacagatgtatacaatagcaaagtttcatttctttaccttgaaacgtgaaagtaaatcagtgagatcagtgttgcttctgcttttaatttttttcacagttcagatttttatgtttttggttcatcactcttttaaaaatgctgtggttcccatcaaacttgttccagacttatattttctaaaacctggagacaaaccacataaatacaaaacaagtctgcttcttcaaaattctgctgactcagatatcagtgatcttattagctttttcacaagccagaacataatggtgacgatgattaatgacagtgactatgtatccgtggctccccatagtgcggctttaaatgtgatgcattcagaaaaggactatgtttttgcagctgttttcaacagtactatggtttattctttacctatattagtgaatatcattagtaactactatctttatcatttaaatgtgactgaaaccatccagatctggagtaccccattctttcaagaaattactgatatagtttttaaaattgagctgtattttcaagcagctttgcttggaatcattgttactgcaatgccaccttactttgccatggaaaatgcagagaatcataagatcaaagcttatactcaacttaaactttcaggtcttttgccatctgcatattggattggacaagctgttgttgatatccccttattttttatcattcttattttgatgctaggaagcttattggcatttcattatggattatatttttatactgtaaagttccttgctgtggttttttgccttattggttatgttccatcagttattctgttcacttatattgcttctttcacctttaagaaaattttaaataccaaagaattttggtcatttatctattctgtggcagcgttggcttgtattgcaatcactgaaataactttctttatgggatacacaattgcaactattcttcattatgccttttgtatcatcattccaatctatccacttctaggttgcctgatttctttcataaagatttcttggaagaatgtacgaaaaaatgtggacacctataatccatgggataggctttcagtagctgttatatcgccttacctgcagtgtgtactgtggattttcctcttacaatactatgagaaaaaatatggaggcagatcaataagaaaagatccctttttcagaaacctttcaacgaagtctaaaaataggaagcttccagaaccaccagacaatgaggatgaagatgaagatgtcaaagctgaaagactaaaggtcaaagagctgatgggttgccagtgttgtgaggagaaaccatccattatggtcagcaatttgcataaagaatatgatgacaagaaagattttcttctttcaagaaaagtaaagaaagtggcaactaaatacatctctttctgtgtgaaaaaaggagagatcttaggactattgggtccaaatggtgctggcaaaagcacaattattaatattctggttggtgatattgaaccaacttcaggccaggtatttttaggagattattcttcagagacaagtgaagatgatgattcactgaagtgtatgggttactgtcctcagataaaccctttgtggccagatactacattgcaggaacattttgaaatttatggagctgtcaaaggaatgagtgcaagtgacatgaaagaagtcataagtcgaataacacatgcacttgatttaaaagaacatcttcagaagactgtaaagaaactacctgcaggaatcaaacgaaagttgtgttttgctctaagtatgctagggaatcctcagattactttgctagatgaaccatctacaggtatggatcccaaagccaaacagcacatgtggcgagcaattcgaactgcatttaaaaacagaaagcgggctgctattctgaccactcactatatggaggaggcagaggctgtctgtgatcgagtagctatcatggtgtctgggcagttaagatgtatcggaacagtacaacatctaaagagtaaatttggaaaaggctactttttggaaattaaattgaaggactggatagaaaacctagaagtagaccgccttcaaagagaaattcagtatattttcccaaatgcaagccgtcaggaaagtttttcttctattttggcttataaaattcctaaggaagatgttcagtccctttcacaatctttttttaagctggaagaagctaaacatgcttttgccattgaagaatatagcttttctcaagcaacattggaacaggtttttgtagaactcactaaagaacaagaggaggaagataatagttgtggaactttaaacagcacactttggtgggaacgaacacaagaagatagagtagtattttgaatttgtattgttcggtctgcttactgggacttctttctttttcacttaattttaactttggtttaaaaagttttttattggaatggtaactggagaaccaagaacgcacttgaaatttttctaagctccttaattgaaatgctgtggttgtgtgttttgcttttctttaaataaaacgtatgtataattaagtgaagctgcatgtttgtattgaagtatattgaactatatagtttgtatgtcatctttttcaccattcagaaacagtgcttctgaatttgtgatttaaaggaattgtaatagaatagttttatttttaagttatctttaagtttatgccatcttcttaaataagtacgtaatgttccaatctaaataaaaaactaattcataactaatgcatagaaaagatacataaagcaatgtgaaagtttcttgcttctcctttttaatttctaaaaaagccactttgaatggaagttgtcatccgtaaaagctgaagtgtaagcactaggaaatctcaatatagagatttgaggaaagttatatccactaggtggcagtcattgatcataataagtgaaatgagcccttgttctagtacatgattttaggcttaggtaattaggtatgtgaaattacatttctttaatttaaagtaaaattcagaaggttttagttattataattaaaggaagactgtgtgtagaatcttacgtaatagtctgattctttgactctgtggctagaatgacagttatctatggaggtggtagaattaagccataccttttccttcatcactcttggaacatataaattttttgtcatcttccttgcaaagggcacatttaattttgttcttgaataaaatattttattgggtaaaaaaaaaaa

SEQ ID NO: 993 - DNA, 490 bp, Artificial Sequence
  Description of Artificial sequences:primer
  misc_feature (1)..(490): 3' terminal sequence from clone image:39961. non-metastatic cells 1, protein (nm23a) expressed in(NME1) gene.
  misc_feature (27)..(27): n is a, c, g, or t
  misc_feature (153)..(153): n is a, c, g, or t
  misc_feature (262)..(262): n is a, c, g, or t
  misc_feature (293)..(293): n is a, c, g, or t
  misc_feature (300)..(300): n is a, c, g, or t
  misc_feature (353)..(353): n is a, c, g, or t
  misc_feature (380)..(380): n is a, c, g, or t
  misc_feature (433)..(433): n is a, c, g, or t
  misc_feature (446)..(446): n is a, c, g, or t
  misc_feature (454)..(454): n is a, c, g, or t
tttttttttttttttttttttttgctnggaggaagcattttaatcagatggtcggggatggtaacactgtacagggagaactcacagctccaagagcttccctccaaattatgatgaagttcctgtaaataactagatttcctacagcctggncccctgcccatgggaaggaggggaaatggatgtgaaaagcaatgtggtctgccctcctgtcattcatagatccagttctgagcacagctcgtgtaatctaccagttccncagggtgaaaccacaagccgatctccttctntgcactntccacagaatcactgccatgtataatgttcctgccaacttgtatgcagaagtntccacggatgggtcccagggtttgggngtttgcagggttggttttccccgaggcatgatttcgggcccgtttttcaccanatttcagcccttnccagaccntgggaattaccggcctgagtgcatgttttttcacct

SEQ ID NO: 994 - DNA, 391 bp, Artificial Sequence
  Description of Artificial sequences:primer
  misc_feature (1)..(391): 5' terminal sequence from clone image:39961. non-metastatic cells 1, protein (nm23a) expressed in(NME1) gene.
  misc_feature (56)..(56): n is a, c, g, or t
  misc_feature (58)..(58): n is a, c, g, or t
  misc_feature (357)..(357): n is a, c, g, or t
tcaggccgacgacagggctgtgcttgatttgtgtctgtcgagagcagtgccgggcngnagttggcgctctgtaagtgcttgctgaataaatgacgggtgtgtgtgtcattcattcagcaagcactgagtcttactgttgtgtcaccgggaccgatgtggagggacatttttagggtgtatttctggcgctttagtcctgttttctcctggacaatttatgcttgccccgcaccccatcgtgcgattctccgcagtctttgggctttgtctctctctctttttttttttttggaagttgcagaatggtgataaatgattttctttgctcctattgactgctaggccctgtggctaggnaccataggagtctctacacaggactaaatcaagc

SEQ ID NO: 995 - DNA, 355 bp, Artificial Sequence
  Description of Artificial sequences:primer
  misc_feature (1)..(355): 3' terminal sequence from clone image:39972. a disintegrin and metalloproteinase domain 23(ADAM23) gene.
  misc_feature (26)..(26): n is a, c, g, or t
  misc_feature (178)..(178): n is a, c, g, or t
  misc_feature (248)..(248): n is a, c, g, or t
tttttttttaaggtttaaagagaaanagaatactgtattaaagaaaatgtgtatatttacttcttcccaatctcagttctagactaagaagtaattcaaacacattttaaaaatatgatatatcagaatccttaatttggcagtaacataaattatatactttaaaggcaaaaacagntattcttatgtgtctcctcttaagtcaattaggaatgttatactggtgcattgggaacagtgtcaacganttcagtattccatgaattgaaaccaaaatcacacaaacccttgggtccttcatccttgggggggtgaaggggtcctaactggggtcccggatactggcaatctgtcc

SEQ ID NO: 996 - DNA, 405 bp, Artificial Sequence
  Description of Artificial sequences:primer
  misc_feature (1)..(405): 5' terminal sequence from clone image:39972. a disintegrin and metalloproteinase domain 23(ADAM23) gene.
  misc_feature (175)..(175): n is a, c, g, or t
  misc_feature (206)..(206): n is a, c, g, or t
  misc_feature (219)..(219): n is a, c, g, or t
  misc_feature (330)..(330): n is a, c, g, or t
  misc_feature (345)..(345): n is a, c, g, or t
  misc_feature (369)..(369): n is a, c, g, or t
  misc_feature (375)..(375): n is a, c, g, or t
  misc_feature (394)..(394): n is a, c, g, or t
tggagcctgccttttcaacaggccaacaaagctatttgagcccacggaatgtggaaatggatacgtggaagctggggaggagtgtgattgtggttttcatgtggaatgctatggattatgctgtaagaaatgttccctctccaacggggctcactgcagcgacgggccctgctgnaacaatacctcatgtctttttcagccacganggtatgaatgccnggatgctgtgaacgagtgttatattactgaatatttgtactggagactctggtcagtgcccaccaaattctttcataaggcaagacgggatatggcatggcaatcaaaatncaggggccgctgctnacaatggcgagttgcaagaccagnggacancccagtgtcagtacatctngggggaacaaa

SEQ ID NO: 997 - DNA, 3054 bp, Artificial Sequence
  Description of Artificial sequences:primer
  misc_feature (1)..(3054): a disintegrin and metalloproteinase domain 23(ADAM23) gene.
tcctctgcgtcccgccccgggagtggctgcgaggctaggcgagccgggaaagggggcgccgcccagccccgagccccgcgccccgtgccccgagcccggagccccctgcccgcggcggcaccatgcgcgccgagccggcgtgaccggctccgcccgcggccgccccgcagctagcccggcgctctcgccggccacacggagcggcgcccgggagctatgagccatgaagccgcccggcagcagctcgcggcagccgcccctggcgggctgcagccttgccggcgcttcctgcggcccccaacgcggccccgccggctcggtgcctgccagcgccccggcccgcacgccgccctgccgcctgcttctcgtccttctcctgctgcctccgctcgccgcctcgtcccggccccgcgcctggggggctgctgcgcccagcgctccgcattggaatgaaactgcagaaaaaaatttgggagtcctggcagatgaagacaatacattgcaacagaatagcagcagtaatatcagttacagcaatgcaatgcagaaagaaatcacactgccttcaagactcatatattacatcaaccaagactcggaaagcccttatcacgttcttgacacaaaggcaagacaccagcaaaaacataataaggctgtccatctggcccaggcaagcttccagattgaagccttcggctccaaattcattcttgacctcatactgaacaatggtttgttgtcttctgattatgtggagattcactacgaaaatgggaaaccacagtactctaagggtggagagcactgttactaccatggaagcatcagaggcgtcaaagactccaaggtggctctgtcaacctgcaatggacttcatggcatgtttgaagatgataccttcgtgtatatgatagagccactagagctggttcatgatgagaaaagcacaggtcgaccacatataatccagaaaaccttggcaggacagtattctaagcaaatgaagaatctcactatggaaagaggtgaccagtggccctttctctctgaattacagtggttgaaaagaaggaagagagcagtgaatccatcacgtggtatatttgaagaaatgaaatatttggaacttatgattgttaatgatcacaaaacgtataagaagcatcgctcttctcatgcacataccaacaactttgcaaagtccgtggtcaaccttgtggattctatttacaaggagcagctcaacaccagggttgtcctggtggctgtagagacctggactgagaaggatcagattgacatcaccaccaaccctgtgcagatgctccatgagttctcaaaataccggcagcgcattaagcagcatgctgatgctgtgcacctcatctcgcgggtgacatttcactataagagaagcagtctgagttactttggaggtgtctgttctcgcacaagaggagttggtgtgaatgagtatggtcttccaatggcagtggcacaagtattatcgcagagcctggctcaaaaccttggaatccaatgggaaccttctagcagaaagccaaaatgtgactgcacagaatcctggggtggctgcatcatggaggaaacaggggtgtcccattctcgaaaattttcaaagtgcagcattttggagtatagagactttttacagagaggaggtggagcctgccttttcaacaggccaacaaagctatttgagcccacggaatgtggaaatggatacgtggaagctggggaggagtgtgattgtggttttcatgtggaatgctatggattatgctgtaagaaatgttccctctccaacggggctcactgcagcgacgggccctgctgtaacaatacctcatgtctttttcagccacgagggtatgaatgccgggatgctgtgaacgagtgtgatattactgaatattgtactggagactctggtcagtgcccaccaaatcttcataagcaagacggatatgcatgcaatcaaaatcagggccgctgctacaatggcgagtgcaagaccagagacaaccagtgtcagtacatctggggaacaaaggctgcagggtctgacaagttctgctatgaaaagctgaatacagaaggcactgagaagggaaactgcgggaaggatggagaccggtggattcagtgcagcaaacatgatgtgttctgtggattcttactctgtaccaatcttactcgagctccacgtattggtcaacttcagggtgagatcattccaacttccttctaccatcaaggccgggtgattgactgcagtggtgcccatgtagttttagatgatgatacggatgtgggctatgtagaagatggaacgccatgtggcccgtctatgatgtgtttagatcggaagtgcctacaaattcaagccctaaatatgagcagctgtccactcgattccaagggtaaagtctgttcgggccatggggtgtgtagtaatgaagccacctgcatttgtgatttcacctgggcagggacagattgcagtatccgggatccagttaggaaccttcacccccccaaggatgaaggacccaagggtcctagtgccaccaatctcataataggctccatcgctggtgccatcctggtagcagctattgtccttgggggcacaggctggggatttaaaaatgtcaagaagagaaggttcgatcctactcagcaaggccccatctgaatcagctgcgctggatggacaccgccttgcactgttggattctgggtatgacatactcgcagcagtgttactggaactattaagtttgtaaacaaaacctttgggtggtaatgactacggagctaaagttggggtgacaaggatggggtaaaagaaaactgtctcttttggaaataatgtcaaagaacacctttcaccacctgtcagtaaacgggggagggggcaaaagaccatgctataaaaagaactgttccagaatctttttttttccctaatggacgaaggaacaacacacacacaaaaattaaatgcaataaaggaatcattaaaaa

SEQ ID NO: 998 - DNA, 166 bp, Artificial Sequence
  Description of Artificial sequences:primer
  misc_feature (1)..(166): 3' terminal sequence from clone image:40017. cytochrome c, somatic(CYCS) gene.
ttttttttttgatctgtggttttctttttaattatctttagtcttgtgatcacacataattttaaaatttgtgtatatctccgttactttaatccttttaagttggcaaaagcaccattcccaatcaaatacacagttctacagttttgtttctgaatggctgttt

SEQ ID NO: 999 - DNA, 563 bp, Artificial Sequence
  Description of Artificial sequences:primer
  misc_feature (1)..(563): 5' terminal sequence from clone image:40017. cytochrome c, somatic(CYCS) gene.
  misc_feature (419)..(419): n is a, c, g, or t
  misc_feature (473)..(473): n is a, c, g, or t
  misc_feature (483)..(483): n is a, c, g, or t
  misc_feature (531)..(531): n is a, c, g, or t
  misc_feature (537)..(537): n is a, c, g, or t
  misc_feature (557)..(557): n is a, c, g, or t
ggcttcggagcgggagtgttcgttgtgccagcgactaaaaagagaattaaatatgggtgatgttgagaaaggcaagaagatttttattatgaagtgttcccagtgccacaccgttgaaaagggaggcaagcacaagactgggccaaatctccatggtctctttgggcggaagacaggtcaggcccctggatactcttacacagccgccaataagaacaaaggcatcatctggggagaggatacactgatggagtatttggagaatcccaagaagtacatccctgggaacaaaaatgatctttgtcggcattaagaagaaggaagaaagggcagacttaatagcttatctcaaaaaagctactaatgagtaataattggccactgccttatttattacaaaacagaaatgtctcatgacntttttatgtgtacctcctttaatagatctctacaccagattcagtcctggatgnctgacggatnttttgttgggcgtcccgtttaaactaggctggctgtggttaattgatntgttcngtttttggttttatagtacncccttc

SEQ ID NO: 1000 - DNA, 3990 bp, Artificial Sequence
  Description of Artificial sequences:primer
  misc_feature (1)..(3990): cytochrome c, somatic(CYCS) gene.
ggacgtccggcttcggagcgggagtgttcgttgtgccagcgactaaaaagagaattaaatatgggtgatgttgagaaaggcaagaagatttttattatgaagtgttcccagtgccacaccgttgaaaagggaggcaagcacaagactgggccaaatctccatggtctctttgggcggaagacaggtcaggcccctggatactcttacacagccgccaataagaacaaaggcatcatctggggagaggatacactgatggagtatttggagaatcccaagaagtacatccctggaacaaaaatgatctttgtcggcattaagaagaaggaagaaagggcagacttaatagcttatctcaaaaaagctactaatgagtaataattggccactgccttatttattacaaaacagaaatgtctcatgacttttttatgtgtaccatcctttaatagatctcatacaccagaattcagatcatgaatgactgacagaatattttgttgggcagtcctgatttaaaactaagactggcttgtggttaaatgaatatgttcagtttttgaattttaatagtaactccaattcagtaaatggtatcactgtttaccccttttaaagatatgattagacttcgttagtaatgttcaacttttcacaaagatggtgagtgccatcttaaaacttactggagattggttttatatttagatttatataactggttatgtgaatatatttaaatactggggaaattgcttcactgtcttagaaccaagcaagattcacctgtgttttgtgttcatgttcatttgcctcttaaaggcaagggttgaagataaataaggttgcaatgtctatagttttggccttaactatgccaatctaattataattccctgtatttaaaatggtttcttttacttattgaaaggcattttagtgtggtttatgtgtaatattaaagattattcaacacctctcacatcttacagatctataaggtcacatgcttttaaaatagtagcaagttaaacttcactcttgaattctttacaatctaagtcaaactaagttataatttaggattgtctttaaacagccattcagaaacaaaactgtagaactgtgtatttgattgggaatggtgcttttgccaacttaaaaggattaaagtaacggagatatacacaaattttaaaattatgtgtgatcacaagactaaagataattaaaaagaaaaccacagatcatgactttttgactgtgcttgatttcatgactgatgcacaaattttaatgattaaaaagtgcaggagccctaaatgtcagtgcagcagccctaaatgtcagtgcagcagtgttaaccagtcatggtgctagattgtttacttggttttctaggactgcctcaactagaataacacttcactaattgactcttagtttctttgctcagattgagaactgcagcatttatgccagacatggacagaggaatgcctgtggtcatagttttgtgatgtgtaacagtgtataattacatactgaattatttcatgcatagtctgtgccatacacatttagagtagtccttggagattttatggagatggtgagcacaaggtaagtcataaagaataatgagaaaataaatctatgctggtgcagctgagaactgtatctttgtgggacagtgagaagactgagaagatgtgaatccatggtctcaaaggtgatagggacgattagataggtgttttaaggcctgaaagcaatttataacatatgagtcttatttttatttatagaaatgtggaaagcttgctgtaattcatatttgaagtcctagtctgagttctggtggggaatttaaaaatgcatcctggaaatcctttaaagatttcagactttgaaaggccttgtagcagaggacttggtgactgtataaagttagtggtattcagggacagtgtagcaagtagcttacaaggggacaattctggactaatgagaaagacctgaagtgaaggctagagagttgattttttttttttttggcatcctggaaatgatacaggaaacatattaagatagatacagaaatgtgttcaaccttccatcttggctagttgtggcgtttagtttgttttttgagacatggtcacgctgtgtcgccaaggctggagtgcagtggtgcgatctcggctggctgcagcctctatttcccaggctcaagcgattctctcacttcagcttcccaagtagctgggactgcgggtgttcgccaccatgcccagctaatttttttgtagagatggagttttgccatgtggtcccaggctggtctcaaactcctgagctcaagcaatccgtccacttgccttggctccccaaagtgctgggattgcaggcgtgagccaccaggccctgcctggttttcaaattcagaaatcttattatttaacccagaagtaatcagcccagtagtaacttaggtttaattttttttcaggtttaaaatttttctcatttattttttctgagacggagtttcgcccttttcgcccaggctgagtacagtggtgcaatctcactgcaacctccgccttccagttgcaagtgattctcctgcctcagcctcctgagtagctgggattgcaggcacccgccaccacgcctggctaatttttgtatttttagtggagatggtgtttcaccatgttggccagactggtcttggactcctgacctcgtgatccacccaccttggcctcccaaagttctaggattacaggtgtgagccaccacgtccggccaatttttctcatttctatgcctcctatattaaggtctgtgttggcacagatgagtaactgccatgttctaggtcagttatacccaagcacttctggtggtttaaaatgtgattctgtaacttttttatttttatttttttgagataatttcactcttgttgcccaggctggagtgcaatggcgtgatcgctgctcaccgcaacctccgccttccaggttcaagcgattctcctgactcagcctctcaagtagctgggattacaagcatgcgccaccatgcccagcttattttgtgtttttagtagagacagggtttctccatgctggacaggctggtcttgaactcccgacgtcgggtgatctgcctgcctcggcctcccaaagtgctgggattacaggcgtgagccaccacgcctggccaattatgtaattttttaaaaaggacatttctatcagggatatataccttcagaaataaggaaataggggaaaaaaagagcactataaaccacatgttttcatttctagtgcttcgctgtaagtggctaggttggtagaatcaaaaacaagggccagatgtatttaaggggtattcagatgccacctacatgcttattttgtctagaacagtgctgtctaatagaactttctgtgacgatggatattttgtagacttttgctgtccagtgtggtagccactaaccacatgtggctgttaagcccttgaaatatagctagtgtgactagaaagtattttattttaaatttacataggcacaagtggctagtggctactgtattgacattctgggtctaggactagaaccagtggtctgtaacaaaagtactttctctttactctattaaatctagaattagccgggcatggtcgctcatgcctgtggtcccagcactttgggaggccaaggcaggcagatcacttgaggtcgggcgtttgagaccagcctggtcaacatggcgaaaccctgtctctacaaaaaacataaaagttagccaggtgtggtggtgggcacctgtagtctcagctacttgggaggctgaggcacaagaatcacttgaacttgggaggtggaggttgcagtgagccaggattgtgccactgcactcaagcctgggtgacgagtgaaactgtctccaaaaaaaaaaaaaaaaa

SEQ ID NO: 1001 - DNA, 379 bp, Artificial Sequence
  Description of Artificial sequences:primer
  misc_feature (1)..(379): 3' terminal sequence from clone image:40567. gcn1 general control of amino-acid synthesis 1-like 1 (yeast)(GCN1L1) gene.
  misc_feature (237)..(237): n is a, c, g, or t
  misc_feature (348)..(348): n is a, c, g, or t
  misc_feature (365)..(365): n is a, c, g, or t
  misc_feature (373)..(373): n is a, c, g, or t
ttttttttttaaatcaaagcctttattaaacattcctctttcaaacagcctttcaaacctatacccctccccagacttgggaactgccagagctgtgaatcattttcatctgacagggatcagatccattcagacctcacaatattgaaaagccaagccagacacaccacactgggcagagatccaccgtctgtgccccactcggggatatagggaaaaaggttgggtaggcgccantcttcaaaccaggaggctcaaggcacagggaggaagagggaacccacagtctggaccctgctattatagttccagacctaggccatgcttaaactgggacaaacagctccnggggctgccatttgctnagggcggnatgggt

SEQ ID NO: 1002 - DNA, 452 bp, Artificial Sequence
  Description of Artificial sequences:primer
  misc_feature (1)..(452): 5' terminal sequence from clone image:40567. gcn1 general control of amino-acid synthesis 1-like 1 (yeast)(GCN1L1) gene.
  misc_feature (385)..(385): n is a, c, g, or t
  misc_feature (425)..(425): n is a, c, g, or t
  misc_feature (435)..(435): n is a, c, g, or t
  misc_feature (441)..(441): n is a, c, g, or t
  misc_feature (447)..(447): n is a, c, g, or t
ggctgaccctgaggccctccgtggtcagcatcactggccctctgatccgcatcctgggggacaggttcagctggaatgtgaaggcggctctgctcgagacactcagcctcttgttggctaaggttgggattgccctgaagcccttcctgccccagctgcagaccactttcaccaaagccctgcaggactccaaccggggggtgcgcctgaaggccgcagatgctctggggaagctcatttccatccacattaaggtggaccccctcttcacagagctgctcaatgggcatccgcgccatgggaggacccagggtgtcagggacacatggttgcaggccctgaggttttgttgattcagggagcaggggccaaagtgggattgccntcatccggaaaaaacatcgttttcattccttgttgaagcntgttgggganacgttntagggncaaca

SEQ ID NO: 1003 - DNA, 430 bp, Artificial Sequence
  Description of Artificial sequences:primer
  misc_feature (1)..(430): 3' terminal sequence from clone image:40721. retinoblastoma binding protein 1(RBBP1) gene.
  misc_feature (165)..(165): n is a, c, g, or t
  misc_feature (221)..(221): n is a, c, g, or t
  misc_feature (228)..(228): n is a, c, g, or t
  misc_feature (267)..(267): n is a, c, g, or t
  misc_feature (352)..(352): n is a, c, g, or t
  misc_feature (361)..(361): n is a, c, g, or t
  misc_feature (366)..(366): n is a, c, g, or t
  misc_feature (386)..(386): n is a, c, g, or t
  misc_feature (396)..(396): n is a, c, g, or t
  misc_feature (408)..(408): n is a, c, g, or t
ttttttttttttttacaagagtactttttttgtttttaattctctgagaaaatggaatctgaatcacaagttcacaatgtagtaaaatgaaattaagaaacaatgatttcagtaatgctatgccatcactagtgtttagctctgactttttcttgtaaatcagancctgatatacagtctagagcatctaggttattattctacagcatattaaacacagnaaaaggnggtttaaaaaaaaaacccctttcaatgtacaaacatgantttaaaaactgcttttataaaatcacctttttacataatgtatatggcaaaactgctttaaatacatggattttgggaggatttntttacaaantgctntccggtctgtgggggaccantttcacaggncaaggccttacntgggttggctttacttggggtg

SEQ ID NO: 1004 - DNA, 468 bp, Artificial Sequence
  Description of Artificial sequences:primer
  misc_feature (1)..(468): 5' terminal sequence from clone image:40721. retinoblastoma binding protein 1(RBBP1) gene.
  misc_feature (1)..(1): n is a, c, g, or t
  misc_feature (178)..(178): n is a, c, g, or t
  misc_feature (438)..(438): n is a, c, g, or t
  misc_feature (447)..(447): n is a, c, g, or t
nggagctttcagctcaatgaattagataatatgaacagtacagagagaatctcatttctccaagaaaaactacaggaaatcagaaaatattatatgtctttgaagtctgaagttgcaaccatagacaggaggagaaaaagattaaaaaagaaagacagggaagtgtctcatgcggganctccatgtcatctgcttcatcagacactggaatgagtccctcatcatcgtctcccccacaaaatgtacttgctgtagaatgtaggtgataaacattttctctaccttcccagcagtttgctgccatgggacataaatccccaaaccctggaattacaaccacaggaaaggcacttcaactgggtttggacattggctaaggtattattcctgttattactttttccggggtgggattgtattctatttcccctctctctntcttttttnttgttggcaaaaaataggtgt

SEQ ID NO: 1005 - DNA, 4834 bp, Artificial Sequence
  Description of Artificial sequences:primer
  misc_feature (1)..(4834): retinoblastoma binding protein 1(RBBP1) gene.
cgaggtcagaggggaggaggactctggagctgacagcgcgcacttcacccgcagttgttctagcgactgcgaagatagctcgctgagctggaaccccacagatcaccaacaaaaatgaaggcggcagatgagcctgcctacctgacagtgggaaccgatgtcagtgccaagtaccgaggtgccttctgtgaggcaaagattaagactgtgaaaaggctggtgaaagttaaggtactcctgaaacaggataataccacacaattggtacaagatgaccaagtaaagggtcctttaagagttggagctattgttgaaacaaggacatctgatggatcttttcaggaagctattatcagcaagttgacagatgctagttggtataccgtggtgtttgatgatggtgatgagcgaacattgagacgtacctcactttgtctgaaaggagagagacattttgcagagagtgagacacttgaccagcttccattaacaaatccagagcattttggaactccagtaattgcaaagaagacgaacagaggaaggagatcttctcttcctgttactgaagatgaaaaggaagaagaaagcagtgaagaggaagatgaagacaagcgccgtctcaatgatgaattactaggaaaagttgtaagtgtggtgtctgcaacggagaggactgaatggtatcctgctttggtaatatctcccagctgtaatgatgacatcacagtgaaaaaggatcagtgtttagttcgatcatttattgattctaaattttactctatagcaagaaaggacattaaggaagtagacattctcaatctaccggaatctgagctctccactaaaccagggcttcagaaagcaagcatcttcttaaaaactagagttgttcctgataattggaaaatggatataagtgaaatccttgagtcatccagtagtgatgatgaagatggcccagctgaagaaaatgatgaagagaaggaaaaggaggccaaaaagacagaagaagaggtgcctgaggaagaacttgatcctgaagagagggacaacttcctccagcagctttataagtttatggaagacagaggtactccaatcaacaaaccacctgttttgggctataaagatctcaatctcttcaaactcttcagactggtttatcatcagggtggatgtgacaatattgatagtggtgctgtatggaagcaaatttatatggaccttggcattcctattttgaattcagctgcttcctacaatgtaaaaactgcttatagaaagtatctctatggttttgaggagtactgccgttcggcaaatattcagttcagaactgttcatcaccatgaaccaaaagtaaaagaggaaaaaaaagacttagaagaatcaatggaagaggctctcaaattagatcaagaaatgcctttaacagaagtgaagagtgaacctgaggaaaatatcgattcaaacagtgaaagtgaaagagaagagatagaattaaaatctccgaggggacgaaggagaattgctcgagatgtaaattctattaaaaaggaaattgaagaagagaaaacagaagacaaattaaaagataatgatacagaaaataaggatgtagatgatgactatgaaactgcagagaaaaaagaaaatgagctactactggggagaaaaaatacaccaaagcaaaaagagaagaaaattaaaaaacaggaggattctgacaaagactcagatgaagaggaagagaaaagccaagagagggaagaaactgaaagcaaatgtgactctgaaggagaggaagatgaggaagacatggaaccctgcctaacaggaaccaaagtgaaagtaaaatatggacgagggaagactcagaaaatttatgaagccagtattaaaagcactgaaattgatgacggagaagttttatatttggtacattactatggatggaatgtcaggtatgatgagtgggtgaaggctgacaggataatctggcctttggacaaaggtggaccaaagaaaaaacagaagaaaaaagctaaaaataaagaagatagtgaagtggacgaaaagagagatgaggagaggcagaagtcaaaacggggacgacctcctttaaaatcaaccctctcatcaaacatgccgtatggcttatctaagacagcaaacagtgaaggaaaatcagactcttgttcatctgatagtgaaacagaagatgctttagaaaagaatttaataaatgaagaactttctcttaaagatgaactagaaaaaaatgaaaatttgaatgatgataagctagatgaagaaaatccaaagatttctgcacatatattaaaagaaaatgataggactcaaatgcagcctttagaaaccctgaagttagaagttggagagaatgaacaaatagtacagatttttgggaacaaaatggaaaaaacagaagaagttaagaaagaagccgaaaaatctccaaaaggaaagggaagacgaagcaagacaaaagatctttctttagaaattataaagatttcatcatttggccagaatgaagcaggaagtgaacctcatatagaagctcatagtcttgaattgtcttcattagacaataaaaacttttcttctgctacagaagatgaaattgaccaatgtgtgaaagaaaagaagttgaaacggaaaatactaggacaatcatcgccagagaaaaaaataagaattgagaatggaatggaaatgacaaatactgtatctcaagaaaggaccagtgattgtattggatctgagggaatgaaaaacttaaattttgaacagcactttgaaagagaaaatgaaggaatgccatcattgatagcagagtcaaaccaatgcatccaacaactgactagtgaaagatttgatagtccagctgaagaaactgtaaatattccactaaaagaagatgaggatgcaatgcctctgatcgggcctgaaaccttggtttgccatgaagtagatttggatgatttggatgaaaaggataagaccagcattgaggatgtagcagttgaaagctctgagtctaactctcttgtttctattccacctgccctacctcctgtagtccaacataacttttcagtagcttcaccacttactcttagtcaagatgagtctcgaagcgtaaaaagtgagagtgatataacgattgaagttgatagtattgctgaagaatctcaagaaggtctctgtgagagggaatcggcaaatggatttgaaactaatgttgcctctggtacctgtagtataattgtacaagagagagagagcagagagaagggtcagaagaggccaagtgatggaaatagtggattaatggcaaaaaagcaaaagcgtaccccaaagcgaacaagtgctgcagccaaaaatgaaaagaatggaacaggacaaagcagtgatagtgaagatcttcctgtcctagacaattcaagtaaatgtaccccagtaaagcatcttaatgtatctaagccacagaaacttgcacgatctcctgcaagaatatccccgcacatcaaagatggagagaaagataaacacagagaaaaacatccgaattcatcccctaggacatataaatggagctttcagctcaatgaattagataatatgaacagtacagagagaatctcatttctccaagaaaaactacaggaaatcagaaaatattatatgtctttgaagtctgaagttgcaaccatagacaggaggagaaaaagattaaaaaagaaagacagggaagtgtctcatgcgggagcctccatgtcatctgcttcatcagacactggaatgagtccctcatcatcgtctcccccacaaaatgtacttgctgtagaatgtaggtgataaacattttctctaccttcccagcagtttgctgccatggacataaatccccaaaccctgaattacaaccacagaaagcactcaactggtttgacattgctaagtatatcctgtatacttttccaggctggattgtatctatgcccctctctcttcttttttcttgttgcaaaaaataagctgattaataagtgaaggttaagcagcctgccatatttgtcataatttttcctctttacttttgtttttcgtttgttgtgatatagaacaaagggcacttagcaaatttgaatttgtataataaagctttcaggtgttacagaaatcgtagacaagcaagtgcacatgataaacaatcaaaatattacccagctgaatagttactgctgcactttcactaagatgtatttgaacacttggtgagtagggggtttatgttgtgttttttttcattatcgttttttttatttttgtgaagcacttgctatttagaactgccaaagtatatgttcagcagtgtgcccaggattgaaggtgtaaatgggacaaaataaattgtgaaaggaagtgtagttgactgaaaactacagttgtaataagtcttccactttttataggatttttgagcacacaattatgcaaatattttaatgtttattaatgtttacagtggaattgtgaataagttttcagtggactatcttatcccttgacaaaaatattttgtcttttttctatgtaatttcagagtttttattttgttacaaaaagacaaaaatgaaatatataacaacaatgaagttatttaacaagatttctaaagctgaaatttttgtgtaaaataaggtattatcttgcaacttgttaaatatatttattcagacattggatgttgtatttttatgtattttttaaaatattaataaaatttaaaaaaaaaaaaaaa

SEQ ID NO: 1006 - DNA, 417 bp, Artificial Sequence
  Description of Artificial sequences:primer
  misc_feature (1)..(417): 3' terminal sequence from clone image:41099. calponin 3, acidic(CNN3) gene.
  misc_feature (158)..(158): n is a, c, g, or t
  misc_feature (252)..(252): n is a, c, g, or t
  misc_feature (255)..(255): n is a, c, g, or t
  misc_feature (262)..(262): n is a, c, g, or t
  misc_feature (272)..(272): n is a, c, g, or t
  misc_feature (304)..(304): n is a, c, g, or t
  misc_feature (316)..(316): n is a, c, g, or t
  misc_feature (332)..(332): n is a, c, g, or t
  misc_feature (344)..(344): n is a, c, g, or t
  misc_feature (357)..(357): n is a, c, g, or t
  misc_feature (372)..(372): n is a, c, g, or t
  misc_feature (388)..(388): n is a, c, g, or t
  misc_feature (406)..(406): n is a, c, g, or t
ttttttttttgaaagttcaaaaaaaatatttatttataaaaaatacaatgggataagtttatgctgagaaatgcagcaataaatacagttgaagaaaacagagcaactctacattgatacattggcacaaacaggaagagcaaatgcatcacccaggnctaaatgtccacaggccacttttgtacatgctcttttaggaaacaccactctgaaaagatcttgttcgctagggtaagagattgagtacacatntantcacaantgcacactgntcatggactttatttaaaatttaggcaaacantactgtaggaancattggatatgttaantttctaaaatgnctggcatcttaantttaggttgggcaanggccacctttaggcantaggcctggggttttggntcttccctggt

SEQ ID NO: 1007 - DNA, 484 bp, Artificial Sequence
  Description of Artificial sequences:primer
  misc_feature (1)..(484): 5' terminal sequence from clone image:41099. calponin 3, acidic(CNN3) gene.
  misc_feature (387)..(387): n is a, c, g, or t
  misc_feature (396)..(396): n is a, c, g, or t
  misc_feature (423)..(423): n is a, c, g, or t
  misc_feature (440)..(440): n is a, c, g, or t
  misc_feature (472)..(472): n is a, c, g, or t
ttttgagaatggaaacatgacccaggttcagactactctggtggctctagcaggtctggctaaaacaaaaggattccatacaaccattgacattggagttaagtatgcagaaaaacaaacaagacgttttgatgaaggaaaattaaaagctggccaaagtgtaattggtctgcagatgggaaccaacaaatgtgccagccaggcaggtatgacagcttacgggactaggaggcatctttatgatcccaaaaatgcaaactgacaaaccttttgaccagaccacaattagtctgcagatgggcactaataaaggagccagccaggcagggatgttagcaccaggtaccagaagagacatctatgattcagaagctaacattacagccngttgacaantcgacatttccctacagatgggtaccnacaaagttgctttcccngaaagggattgagtgttttttgggtttgggcngcaagtttttgt

SEQ ID NO: 1008 - DNA, 1607 bp, Artificial Sequence
  Description of Artificial sequences:primer
  misc_feature (1)..(1607): calponin 3, acidic(CNN3) gene.
gctctgtagcacccaggagcggggaagcgaagtgcgagagaccccggaccccagcgctgtctcttcccgccgcccgaaccaccatgacccacttcaacaagggcccttcctatgggctctcggccgaagtcaagaacaagattgcttccaagtatgatcatcaggcagaagaagatcttcgcaattggatagaagaggtgacaggcatgagcattggccccaacttccagctgggcttaaaggatggcatcatcctctgcgaacttataaacaagctacagccaggctcagtgaagaaggtcaacgagtcctcactgaactggcctcagttggagaatattggcaactttattaaagctattcaggcttatggtatgaagccacatgacatattcgaagcaaatgatctttttgagaatggaaacatgacccaggttcagactactctggtggctctagcaggtctggctaaaacaaaaggattccatacaaccattgacattggagttaagtatgcagaaaaacaaacaagacgttttgatgaaggaaaattaaaagctggccaaagtgtaattggtctgcagatgggaaccaacaaatgtgccagccaggcaggtatgacagcttacgggactaggaggcatctttatgatcccaaaatgcaaactgacaaaccttttgaccagaccacaattagtctgcagatgggcactaataaaggagccagccaggcagggatgttagcaccaggtaccagaagagacatctatgatcagaagctaacattacagccggtggacaactcgacaatttccctacagatgggtaccaacaaagttgcttcccagaaaggaatgagtgtgtatgggcttgggcggcaagtatatgatcccaaatactgtgctgctcctacagaacctgtcattcacaacggaagccaaggaacaggaacaaatggttcggaaatcagtgatagtgattatcaggcagaataccctgatgagtatcatggcgagtaccaggatgactaccccagagattaccaatatagcgaccaaggcattgattattagatccacacagaaggagctcagtatttagtcctttgtttttattcagtgagaaccaagctagccttgagtaatttttatcttgtcttcctaaaacactattaagcttattgtacttttaagaaaaattgccttacgtacattcctttttcctttttctgcctcttccctcaatagttgccttttagtgctgtaataggttaaatcctacagcataatcaataactcgcatatgaagtaaaaaggaatactgtgaaaggggagtactcttgtacagccagttcttttatgcaaaaatctatgcatttttacaatcttatattaaactggtattttcaaacaataggaaactttttttttttttttttacagtttagtgtatctggtttctacatggaagactaaactcatgcttattgctaaatgtggtctttgccaactaaatttaagatgcagcattttagaaatttacatatcaatgtttctacagtattgtttgctaatttttaaataaagtcatgatcagtgtgaaaaaaa

SEQ ID NO: 1009 - DNA, 385 bp, Artificial Sequence
  Description of Artificial sequences:primer
  misc_feature (1)..(385): 3' terminal sequence from clone image:41411. ribosomal protein l24(RPL24) gene.
  misc_feature (98)..(99): n is a, c, g, or t
  misc_feature (354)..(354): n is a, c, g, or t
ttttttttttttttttttcttgagtatcagtttattcagacatttttgtagtttaacacagctctggcatgcccccagctcaacaaactactccaggnntttagctaaggatactctttattcaagcagtagtgcttttcatttagatattactttctgaaagcaagagtagattaatacagctgagagtttttagcaccttcaactcaggctattagcaaatgggtagggcgagataccaatgactacaagggaaaccaatataaactacatttgcctatcatggggaaaagggtaatttaacaaggaaaatcatttaaaaagtacttttgttttttgatacaggggtcttgnctgttcacccggggctaggagtgcagtgggc

SEQ ID NO: 1010 - DNA, 456 bp, Artificial Sequence
  Description of Artificial sequences:primer
  misc_feature (1)..(456): 5' terminal sequence from clone image:41411. ribosomal protein l24(RPL24) gene.
  misc_feature (26)..(26): n is a, c, g, or t
  misc_feature (48)..(48): n is a, c, g, or t
  misc_feature (54)..(54): n is a, c, g, or t
  misc_feature (56)..(56): n is a, c, g, or t
  misc_feature (71)..(71): n is a, c, g, or t
  misc_feature (335)..(335): n is a, c, g, or t
  misc_feature (353)..(353): n is a, c, g, or t
  misc_feature (412)..(412): n is a, c, g, or t
  misc_feature (427)..(427): n is a, c, g, or t
  misc_feature (436)..(436): n is a, c, g, or t
  misc_feature (441)..(441): n is a, c, g, or t
  misc_feature (448)..(448): n is a, c, g, or t
ggtacaagatctaccccggacacganggcgctacgcagggaccgacgngaaggntntccagtttcttaatncgaaatgcgagtcggctttcctttccaagaggaatcctcggcagataaactggactgtcctctacagaaggaagcacaaaaagggacagtcggaagaaattcaaaagaaaagaacccgccgagcagtcaaattccagagggccattactggtgcatctcttgctgatataatggccaagaggaatcagaaacctgaagttagaaaggctcaacgagaacaagctattcagggctgctaaggaagcaaaaaaggctaagcaagcntctaaaaagacttgcatngctgctgttaaggcaccttacaaagggcaggcaccttaggcaaaaggtttttgaaggcntgttgaaagttttcngttcccccnagttnggttggnaaacgtta

SEQ ID NO: 1011 - DNA, 556 bp, Artificial Sequence
  Description of Artificial sequences:primer
  misc_feature (1)..(556): ribosomal protein l24(RPL24) gene.
tcttttcgccatcttttgtctttccgtggagctgtcgccatgaaggtcgagctgtgcagttttagcgggtacaagatctaccccggacacgggaggcgctacgccaggaccgacgggaaggttttccagtttcttaatgcgaaatgcgagtcggctttcctttccaagaggaatcctcggcagataaactggactgtcctctacagaaggaagcacaaaaagggacagtcggaagaaattcaaaagaaaagaacccgccgagcagtcaaattccagagggccattactggtgcatctcttgctgatataatggccaagaggaatcagaaacctgaagttagaaaggctcaacgagaacaagctatcagggctgctaaggaagcaaaaaaggctaagcaagcatctaaaaagactgcaatggctgctgctaaggcacctacaaaggcagcacctaagcaaaagattgtgaagcctgtgaaagtttcagctccccgagttggtggaaaacgctaaactggcagattagatttttaaataaagattggattataactct

SEQ ID NO: 1012 - DNA, 455 bp, Artificial Sequence
  Description of Artificial sequences:primer
  misc_feature (1)..(455): 3' terminal sequence from clone image:41452. spermidine/spermine n1-acetyltransferase(SAT) gene.
  misc_feature (81)..(81): n is a, c, g, or t
  misc_feature (195)..(195): n is a, c, g, or t
  misc_feature (231)..(231): n is a, c, g, or t
  misc_feature (247)..(247): n is a, c, g, or t
  misc_feature (298)..(298): n is a, c, g, or t
  misc_feature (307)..(307): n is a, c, g, or t
  misc_feature (317)..(317): n is a, c, g, or t
  misc_feature (395)..(395): n is a, c, g, or t
  misc_feature (427)..(427): n is a, c, g, or t
  misc_feature (446)..(446): n is a, c, g, or t
  misc_feature (451)..(451): n is a, c, g, or t
ttttttttaaatcaaagagtagtttattaaaaaaggaatcaaacaggaaactctaagtaccagtgtgtacattgtacaatnttaaatgactcacgagaatgaagtttttttcaaatatattaagatcacaccaccttgttgtttatcgaaagatattcaaggagaaagatctgactctccaaactgcatctgagnattgccactttaaacaggacctcatttcaaacatgncaacaacgccactggntaataaaggctttgggaatggggtgctcattctattatttcactacaaacngcatagganaggcaggagnagttggggaatttattctaaaataggaatgggagggttgtccatctacagcaggcactccttcacttcctctgtttgncctttttaggcagtactccttggtcggtcttngaacggttttccaaccctnttcantggg

SEQ ID NO: 1013 - DNA, 444 bp, Artificial Sequence
  Description of Artificial sequences:primer
  misc_feature (1)..(444): 5' terminal sequence from clone image:41452. spermidine/spermine n1-acetyltransferase(SAT) gene.
  misc_feature (17)..(17): n is a, c, g, or t
  misc_feature (20)..(20): n is a, c, g, or t
  misc_feature (391)..(391): n is a, c, g, or t
  misc_feature (430)..(430): n is a, c, g, or t
ttttctgacgtctgttnctnaggctggaagaaatgagcagaaaacaagggatgagtactttttagagtatgtgcatgttacgtaatacctgtttctgggcaatgctgcttcttctgactcaacaaatggggagagcaaattgaaaatgcgtaaattggaaggcaagttctgaaattaaacgttgtactttggcctgatgttctgacctttaaggaagcaagagtttgtaaacttccaaatatttactattctgaactgccgtgtaaacctgacgtattcccaagtcaacataccagtataccaataggatgtgaataatgtttgtgttgagtttaaaaccatagcagttttgctctggcaagtaatggaaagcgttctcgcttcctgagtntgagctccagcagactgcagagtggccagtgccacagtngtagcctgactttc

SEQ ID NO: 1014 - DNA, 446 bp, Artificial Sequence
  Description of Artificial sequences:primer
  misc_feature (1)..(446): 3' terminal sequence from clone image:415389. small nuclear ribonucleoprotein polypeptide e(SNRPE) gene.
aatacaaacaatcccatagtatttattgccatcttgtagtaacacgagggtaatcaaaacaatatgaataaatgttcacattggacaaaggacatctaaaaacaaactgtatccttctcaacaatttctcacttcattgatcatttctagttggagacactttgtagcagagtaatattatctccttttagcatgatccgacccagttgttttcttgactttgttttagaatgaatctcttctgcatcatctaatacaaggttcatatactcatcaaaaccaatgatacagccttctatccgcatattcacttgctcatagagccacacctgaatccgcgatctattttgtaagtatctgaagatgaggttgatgggctgcaccataaccttctgcactttctgaccctggccacggtacgccatgggtgggaatttcactcgtgc

SEQ ID NO: 1015 - DNA, 441 bp, Artificial Sequence
  Description of Artificial sequences:primer
  misc_feature (1)..(441): 5' terminal sequence from clone image:415389. small nuclear ribonucleoprotein polypeptide e(SNRPE) gene.
  misc_feature (343)..(343): n is a, c, g, or t
gaaattccaccatggcgtaccgtggccagggtcagaaagtgcagaaggttatggtgcagcccatcaacctcatcttcagatacttacaaaatagatcgcggattcaggtgtggctctatgagcaagtgaatatgcggatagaaggctgtatcattggttttgatgagtatatgaaccttgtattagatgatgcagaagagattcattctaaaacaaagtcaagaaaacaactgggtcggatcatgctaaaacggagataatattactctgctacaaacgtgtctccaactagaaatgatcaatgaagtgagaaattgttgagaaggatacagtttgtttttangatgtcctttgtccaatgtgaacatttattccatattgttttgattaccctcgtgttactacaagatggcaataaatactatgggattggttttgtat

SEQ ID NO: 1016 - DNA, 500 bp, Artificial Sequence
  Description of Artificial sequences:primer
  misc_feature (1)..(500): small nuclear ribonucleoprotein polypeptide e(SNRPE) gene.
gctctcagaggcagcgtgcgggtgtgctctttgtgaaattccaccatggcgtaccgtggccagggtcagaaagtgcagaaggttatggtgcagcccatcaacctcatcttcagatacttacaaaatagatcgcggattcaggtgtggctctatgagcaagtgaatatgcggatagaaggctgtatcattggttttgatgagtatatgaaccttgtattagatgatgcagaagagattcattctaaaacaaagtcaagaaaacaactgggtcggatcatgctaaaaggagataatattactctgctacaaagtgtctccaactagaaatgatcaatgaagtgagaaattgttgagaaggatacagtttgtttttagatgtcctttgtccaatgtgaacatttattcatattgttttgattaccctcgtgttactacaagatggcaataaatactatgggattgtttgtattaaaaaatttacattgcttcttaaaaaaaaa

SEQ ID NO: 1017 - DNA, 341 bp, Artificial Sequence
  Description of Artificial sequences:primer
  misc_feature (1)..(341): 3' terminal sequence from clone image:416060. arginase, liver(ARG1) gene.
  misc_feature (219)..(219): n is a, c, g, or t
  misc_feature (266)..(266): n is a, c, g, or t
  misc_feature (292)..(293): n is a, c, g, or t
  misc_feature (304)..(304): n is a, c, g, or t
  misc_feature (307)..(307): n is a, c, g, or t
  misc_feature (311)..(311): n is a, c, g, or t
  misc_feature (319)..(319): n is a, c, g, or t
  misc_feature (327)..(327): n is a, c, g, or t
aatcttgttataaagagtttattataaaaaatcacattttttgaatgacatggacacatagtacctttccacatgtggtagctttgtctcctgattccaagagtcccactctatgtatgggggcttatgtaagtcgtgcttatttttaatgccagcaaatttttaattggaaatcaatgtacacttctctttctaaggataagtcttttgccaagttangaaaatataagcttttaaatttcaaaaaagttagaatttccacatcntgaattttacaccaagagggaatttnnaagagtttatnctnaatngggaaaancatttttnccgggaaagaacaa

SEQ ID NO: 1018 - DNA, 475 bp, Artificial Sequence
  Description of Artificial sequences:primer
  misc_feature (1)..(475): 5' terminal sequence from clone image:416060. arginase, liver(ARG1) gene.
  misc_feature (32)..(32): n is a, c, g, or t
  misc_feature (162)..(162): n is a, c, g, or t
  misc_feature (168)..(168): n is a, c, g, or t
  misc_feature (180)..(180): n is a, c, g, or t
  misc_feature (250)..(250): n is a, c, g, or t
  misc_feature (336)..(336): n is a, c, g, or t
  misc_feature (370)..(370): n is a, c, g, or t
  misc_feature (374)..(374): n is a, c, g, or t
  misc_feature (399)..(399): n is a, c, g, or t
  misc_feature (460)..(460): n is a, c, g, or t
  misc_feature (471)..(471): n is a, c, g, or t
gtattatatctgccaaggatattgtgtatatnggcttgagagacgtggaccctggggaacactacattttgaaaactctaggcattaaatacttttcaatgactgaagtggacagactaggaattggcaaggtgatggaagaaacactcagctatctactangaaganagaaaaggccanttcatctaagttttgatgttgacggactggacccatctttcacaccagctactggcacaccagtcgtggnaggtctgacatacagatgaaggtctctacatcacagaagaaatctacaaaacacgggctactctcagggattagatataatggaantgaacccatccctgggggaatgacaccagaagantgtnactcgaacagtgaacacagcagttngcaataaccttgggcttgtttcggacttgctcgggagggtaatcacaagcctattgactancttaacccacntaag

SEQ ID NO: 1019 - DNA, 1447 bp, Artificial Sequence
  Description of Artificial sequences:primer
  misc_feature (1)..(1447): arginase, liver(ARG1) gene.
tgtcactgagggttgactgactggagagctcaagtgcagcaaagagaagtgtcagagcatgagcgccaagtccagaaccatagggattattggagctcctttctcaaagggacagccacgaggaggggtggaagaaggccctacagtattgagaaaggctggtctgcttgagaaacttaaagaacaagagtgtgatgtgaaggattatggggacctgccctttgctgacatccctaatgacagtccctttcaaattgtgaagaatccaaggtctgtgggaaaagcaagcgagcagctggctggcaaggtggcagaagtcaagaagaacggaagaatcagcctggtgctgggcggagaccacagtttggcaattggaagcatctctggccatgccagggtccaccctgatcttggagtcatctgggtggatgctcacactgatatcaacactccactgacaaccacaagtggaaacttgcatggacaacctgtatctttcctcctgaaggaactaaaaggaaagattcccgatgtgccaggattctcctgggtgactccctgtatatctgccaaggatattgtgtatattggcttgagagacgtggaccctggggaacactacattttgaaaactctaggcattaaatacttttcaatgactgaagtggacagactaggaattggcaaggtgatggaagaaacactcagctatctactaggaagaaagaaaaggccaattcatctaagttttgatgttgacggactggacccatctttcacaccagctactggcacaccagtcgtgggaggtctgacatacagagaaggtctctacatcacagaagaaatctacaaaacagggctactctcaggattagatataatggaagtgaacccatccctggggaagacaccagaagaagtaactcgaacagtgaacacagcagttgcaataaccttggcttgtttcggacttgctcgggagggtaatcacaagcctattgactaccttaacccacctaagtaaatgtggaaacatccgatataaatctcatagttaatggcataattagaaagctaatcattttcttaagcatagagttatccttctaaagacttgttctttcagaaaaatgtttttccaattagtataaactctacaaattccctcttggtgtaaaattcaagatgtggaaattctaacttttttgaaatttaaaagcttatattttctaacttggcaaaagacttatccttagaaagagaagtgtacattgatttccaattaaaaatttgctggcattaaaaataagcacacttacataagcccccatacatagagtgggactcttggaatcaggagacaaagctaccacatgtggaaaggtactatgtgtccatgtcattcaaaaaatgtgattttttataataaactctttataacaag

SEQ ID NO: 1020 - DNA, 465 bp, Artificial Sequence
  Description of Artificial sequences:primer
  misc_feature (1)..(465): 3' terminal sequence from clone image:41648. interleukin 13 receptor, alpha 2(IL13RA2) gene.
  misc_feature (441)..(441): n is a, c, g, or t
tttttttttttcaacattcgcaagaaaaattcagtttattgagacttattttgaacatttggccatgactggaaactgttgagtcaataccatgtctcttgatatggaaagtcttcatgtatcacagaaaaattctggaatcatttttgggtaggtgtttggcttacgcaaaagcagaccggttacaaatataactaatattaagatgaaaccaaatggtagccagaaacgtaggcaaagttttcttcgataggtcttcaccttcccagcattgtttatcactccactcactccaaattccgtcatctgaggcaataaatattcactttgcttcttactacaaaggcataattgtcgggtttcatttgttgttttcaagggtgtatgtttcattttcaactgtaggcagtcaccaaggtaggtatccatcttctctggtcnccaatttccataatccaaaacacc

SEQ ID NO: 1021 - DNA, 473 bp, Artificial Sequence
  Description of Artificial sequences:primer
  misc_feature (1)..(473): 5' terminal sequence from clone image:41648. interleukin 13 receptor, alpha 2(IL13RA2) gene.
  misc_feature (21)..(21): n is a, c, g, or t
  misc_feature (422)..(422): n is a, c, g, or t
gtaagaacactctcgtgagtnctaacggtcttccggatgaaggctatttgaagtcgccataacctggtcagaagtgtgcctgtcggcggggagagaggcaatatcaaggttttaaatctcggagaaatggctttcgtttgcttggctatcggatgcttatatacctttctgataagcacaacatttggctgtacttcatcttcagacaccgagataaaagttaaccctcctcaggattttgagatagtggatcccggatacttaggttatctctatttgcaatggcaacccccactgtctctggatcattttaaggaatgcacagtggaatatgaactaaaataccgaaacattggtagtgaaacatgggaaggaccatcattactaagaatctacatttacaaaggatggggtttggatcnttaacaaggggcattgaaggcgaaggttacacacggtttttaccctggggc

SEQ ID NO: 1022 - DNA, 1376 bp, Artificial Sequence
  Description of Artificial sequences:primer
  misc_feature (1)..(1376): interleukin 13 receptor, alpha 2(IL13RA2) gene.
gtaagaacactctcgtgagtctaacggtcttccggatgaaggctatttgaagtcgccataacctggtcagaagtgtgcctgtcggcggggagagaggcaatatcaaggttttaaatctcggagaaatggctttcgtttgcttggctatcggatgcttatatacctttctgataagcacaacatttggctgtacttcatcttcagacaccgagataaaagttaaccctcctcaggattttgagatagtggatcccggatacttaggttatctctatttgcaatggcaacccccactgtctctggatcattttaaggaatgcacagtggaatatgaactaaaataccgaaacattggtagtgaaacatggaagaccatcattactaagaatctacattacaaagatgggtttgatcttaacaagggcattgaagcgaagatacacacgcttttaccatggcaatgcacaaatggatcagaagttcaaagttcctgggcagaaactacttattggatatcaccacaaggaattccagaaactaaagttcaggatatggattgcgtatattacaattggcaatatttactctgttcttggaaacctggcataggtgtacttcttgataccaattacaacttgttttactggtatgagggcttggatcatgcattacagtgtgttgattacatcaaggctgatggacaaaatataggatgcagatttccctatttggaggcatcagactataaagatttctatatttgtgttaatggatcatcagagaacaagcctatcagatccagttatttcacttttcagcttcaaaatatagttaaacctttgccgccagtctatcttacttttactcgggagagttcatgtgaaattaagctgaaatggagcatacctttgggacctattccagcaaggtgttttgattatgaaattgagatcagagaagatgatactaccttggtgactgctacagttgaaaatgaaacatacaccttgaaaacaacaaatgaaacccgacaattatgctttgtagtaagaagcaaagtgaatatttattgctcagatgacggaatttggagtgagtggagtgataaacaatgctgggaaggtgaagacctatcgaagaaaactttgctacgtttctggctaccatttggtttcatcttaatattagttatatttgtaaccggtctgcttttgcgtaagccaaacacctacccaaaaatgattccagaatttttctgtgatacatgaagactttccatatcaagagacatggtattgactcaacagtttccagtcatggccaaatgttcaatatgagtctcaataaactgaatttttcttgcgaatgttgaaaaa

SEQ ID NO: 1023 - DNA, 392 bp, Artificial Sequence
  Description of Artificial sequences:primer
  misc_feature (1)..(392): 3' terminal sequence from clone image:416946. thioredoxin(TXN) gene.
  misc_feature (102)..(102): n is a, c, g, or t
  misc_feature (342)..(342): n is a, c, g, or t
agcattaatgttttattgtcacgcagatggcaactgggtttatgtcttcatattttatatttttgtaaattaaaaaaattacaagttttaaatagccaatgntggttatgttttcagaaaacatgattagactaattcattaatcggtcggcttcaagcttttccttattggctccagaaaattcacccaccttttgtcccttcttaaaaaactggaatgttggcatgcatttgacttcacactctgaagcaacatcctgacagtcatccacatctacttcaaggaatatcacgttggaatacttttcagagagggaatgaaagaaaggcttgatcattttngcaaggcccacaccacgtggctgagaagtcaactactacaagtttatcac

SEQ ID NO: 1024 - DNA, 424 bp, Artificial Sequence
  Description of Artificial sequences:primer
  misc_feature (1)..(424): 5' terminal sequence from clone image:416946. thioredoxin(TXN) gene.
ccatttccatcggtccttacagccgctcgtcagactccagcagccaagatggtgaagcagatcgagagcaagactgcttttcaggaagccttggacgctgcaggtgataaacttgtagtagttgacttctcagccacgtggtgtgggccttgcaaaatgatcaagcctttctttcattccctctctgaaaagtattccaacgtgatattccttgaagtagatgtggatgactgtcaggatgttgcttcagagtgtgaagtcaaatgcatgccaacattccaagttttttaagaagggacaaaaaggtgggtgaattttctggagccaataaggaaaagcttgaagccaccattaatgaattagtctaatcatgttttctgaaaacataaccagccattggctatttaaaacttgtaattttttt

SEQ ID NO: 1025 - DNA, 501 bp, Artificial Sequence
  Description of Artificial sequences:primer
  misc_feature (1)..(501): thioredoxin(TXN) gene.
gaattcgctttggatccatttccatcggtccttacagccgctcgtcagactccagcagccaagatggtgaagcagatcgagagcaagactgcttttcaggaagccttggacgctgcaggtgataaacttgtagtagttgacttctcagccacgtggtgtgggccttgcaaaatgatcaaccctttctttcattccctctctgaaaagtattccaacgtgatattccttgaagtagatgtggatgactgtcaggatgttgcttcagagtgtgaagtcaaatgcacgccaacattccagttttttaagaagggacaaaaggtgggtgaattttctggagccaataaggaaaagcttgaagccaccattaatgaattagtctaatcatgttttctgaaaacataaccagccattggctatttaaacttgtatttttttatttacaaaatataaatatgaagacataaccagttgccatctgcgtgacaataaacattatgctaa

SEQ ID NO: 1026 - DNA, 367 bp, Artificial Sequence
  Description of Artificial sequences:primer
  misc_feature (1)..(367): 3' terminal sequence from clone image:417861. transferrin receptor 2(TFR2) gene.
  misc_feature (36)..(36): n is a, c, g, or t
  misc_feature (142)..(142): n is a, c, g, or t
  misc_feature (144)..(144): n is a, c, g, or t
  misc_feature (327)..(327): n is a, c, g, or t
gagactccatagggctcggcgtgggatgctgggaangcctgatgatgcaactggagggaactgggtttgattgaaggaagggaagccaggtgtgtaggggtctccagttcccaggtgcacatgtccatacactgcctgctgntnggacaggcttggcttgggtgggtcctgggagaagtccgctggctctgggtatatgagcactccttgagccccgaagtcctgagcattggtcaccttctgggcgaactgattcacccccacgcgcaccagcagcaggcggcccactggatccacgcccctggcccgcagtcctgcaggtcttcngggccgcccgtagtgggggtaacaccagctctcccgttga

SEQ ID NO: 1027 - DNA, 270 bp, Artificial Sequence
  Description of Artificial sequences:primer
  misc_feature (1)..(270): 5' terminal sequence from clone image:417861. transferrin receptor 2(TFR2) gene.
  misc_feature (5)..(5): n is a, c, g, or t
  misc_feature (137)..(137): n is a, c, g, or t
  misc_feature (147)..(147): n is a, c, g, or t
  misc_feature (200)..(200): n is a, c, g, or t
  misc_feature (209)..(209): n is a, c, g, or t
  misc_feature (218)..(218): n is a, c, g, or t
gcgcntctgactcaggacattcgcgcggcctctcccgccagaagctggaccacgtgtggaccgacacgcactacgtggggctgcaattcccggatccggctcaccccaacaccctgcactgggtcgatgaggccggnaaggtcgganagcagctgccgctggaggaccctgacgtctacttgcccctacagcgccatcgnaaccgtcangggatagcntggtgtacgcccactacgggggcccgaagacctgcaggacctgcgggccagg

SEQ ID NO: 1028 - DNA, 2513 bp, Artificial Sequence
  Description of Artificial sequences:primer
  misc_feature (1)..(2513): transferrin receptor 2(TFR2) gene.
ctgcaggcttcaggaggggacacaagcatggagcggctttggggtctattccagagagcgcaacaactgtccccaagatcctctcagaccgtctaccagcgtgtggaaggcccccggaaagggcacctggaggaggaagaggaagacggggaggagggggcggagacattggcccacttctgccccatggagctgaggggccctgagcccctgggctctagacccaggcagccaaacctcattccctgggcggcagcaggacggagggctgccccctacctggtcctgacggccctgctgatcttcactggggccttcctactgggctacgtcgccttccgagggtcctgccaggcgtgcggagactctgtgttggtggtcagtgaggatgtcaactatgagcctgacctggatttccaccagggcagactctactggagcgacctccaggccatgttcctgcagttcctgggggaggggcgcctggaggacaccatcaggcaaaccagccttcgggaacgggtggcaggctcggccgggatggccgctctgactcaggacattcgcgcggcgctctcccgccagaagctggaccacgtgtggaccgacacgcactacgtggggctgcaattcccggatccggctcaccccaacaccctgcactgggtcgatgaggccgggaaggtcggagagcagctgccgctggaggaccctgacgtctactgcccctacagcgccatcggcaacgtcacgggagagctggtgtacgcccactacgggcggcccgaagacctgcaggacctgcgggccaggggcgtggatccagtgggccgcctgctgctggtgcgcgtgggggtgatcagcttcgcccagaaggtgaccaatgctcaggacttcggggctcaaggagtgctcatatacccagagccagcggacttctcccaggacccacccaagccaagcctgtccagccagcaggcagtgtatggacatgtgcacctgggaactggagacccctacacacctggcttcccttccttcaatcaaacccagaagctcaaaggccctgtggccccccaagaatggcaggggagcctcctaggctccccttatcacctgggccccgggccacgactgcggctagtggtcaacaatcacaggacctccacccccatcaacaacatcttcggctgcatcgaaggccgctcagagccagatcactacgttgtcatcggggcccagagggatgcatggggcccaggagcagctaaatccgctgtggggacggctatactcctggagctggtgcggaccttttcctccatggtgagcaacggcttccggccccgcagaagtctcctcttcatcagctgggacggtggtgactttggaagcgtgggctccacggagtggctagagggctacctcagcgtgctgcacctcaaagccgtagtgtacgtgagcctggacaacgcagtgctgggggatgacaagtttcatgccaagaccagcccccttctgacaagtctcattgagagtgtcctgaagcaggtggattctcccaaccacagtgggcagactctctatgaacaggtggtgttcaccaatcccagctgggatgctgaggtgatccggcccctacccatggacagcagtgcctattccttcacggcctttgtgggagtccctgccgtcgagttctcctttatggaggacgaccaggcctacccattcctgcacacaaaggaggacacttatgagaacctgcataaggtgctgcaaggccgcctgcccgccgtggcccaggccgtggcccagctcgcagggcagctcctcatccggctcagccacgatcgcctgctgcccctcgacttcggccgctacggggacgtcgtcctcaggcacatcgggaacctcaacgagttctctggggacctcaaggcccgcgggctgaccctgcagtgggtgtactcggcgcggggggactacatccgggcggcggaaaagctgcggcaggagatctacagctcggaggagagagacgagcgactgacacgcatgtacaacgtgcgcataatgcggatccccctctctgcgcaggtggagttctacttcctttcccagtacgtgtcgccagccgactccccgttccgccacatcttcatgggccgtggagaccacacgctgggcgccctgctggaccacctgcggctgctgcgctccaacagctccgggacccccggggccacctcctccactggcttccaggagagccgtttccggcgtcagctagccctgctcacctggacgctgcaaggggcagccaatgcgcttagcggggatgtctggaacattgataacaacttctgaggccctggggatcctcacatccccgtcccccagtcaagagctcctctgctcctcgcttgaatgattcagggtcagggaggtggctcagagtccacctctcattgctgatcaatttctcattacccctacacatctctccacgg

SEQ ID NO: 1029 - DNA, 226 bp, Artificial Sequence
  Description of Artificial sequences:primer
  misc_feature (1)..(226): 3' terminal sequence from clone image:41857. nuclear transport factor 2(NUTF2) gene.
  misc_feature (17)..(17): n is a, c, g, or t
  misc_feature (205)..(205): n is a, c, g, or t
ttttttttttttttaanctactgacaagttgctctagtaacccaaagaagtgaaggagaaagcagctgcctcaccgcccagacattgatttgttcagatgtttcaatgcctcatgatacaataaaaccacaaaaattttcttaacagtttaaattgttttaattagtttactagttggctgggcatcagaagctacccagacccnttggtcttttctcaaggttca

SEQ ID NO: 1030 - DNA, 894 bp, Artificial Sequence
  Description of Artificial sequences:primer
  misc_feature (1)..(894): nuclear transport factor 2(NUTF2) gene.
ggaagggacagtcggccgcagaccgcgctgggttgccgctgccgctgccgccatcgtgccagcccctcgggtctccgtgaggccgggtgacgctccagaatgggagacaagccaatttgggagcagattggatccagcttcattcaacattactaccagttatttgataatgatagaacccaactaggcgcaatttacattgacgcgtcatgccttacgtgggaaggacaacagttccaggggaaagctgccattgtggagaagttgtctagccttccgttccagaaaattcagcacagcatcaccgcgcaggaccatcagcccactccagatagctgcatcatcagcatggttgtgggccagcttaaggcggatgaagaccccatcatggggttccaccagatgttcctattaaagaacatcaacgatgcttgggtttgcaccaatgacatgttcaggctcgccctgcacaactttggctgacctcctctcagctaggcactcacgctgtttcctcctccctcctcttcccaatactattcccactcctccagatgctccaaatatcatgcacaaatgagcagggccgcggtgggagtgggcgcagtgcgctgctgccactgaggtgttgtgcatgatgtttggatgctagactagttgcatctgacgggagaagtttgtgttgtaccagcgcatgccttggaaagacttaagtaatgcaaaaggttgtccttttttttttttttttttttttaatctactgacaagttgctctagtaacccaaagaagtgaaggagaaagcagctgcctcaccgcccagacattgatttgttcagatgtttcaatgcctcatgatacaataaaaccacaaaaattttcttaacaaaaaaaaa

SEQ ID NO: 1031 - DNA, 462 bp, Artificial Sequence
  Description of Artificial sequences:primer
  misc_feature (1)..(462): 3' terminal sequence from clone image:42118. purinergic receptor p2x, ligand-gated ion channel, 4(P2RX4) gene.
  misc_feature (103)..(103): n is a, c, g, or t
  misc_feature (303)..(303): n is a, c, g, or t
  misc_feature (347)..(347): n is a, c, g, or t
  misc_feature (378)..(378): n is a, c, g, or t
  misc_feature (439)..(439): n is a, c, g, or t
  misc_feature (456)..(456): n is a, c, g, or t
tttttttttttttttttaagaaaatcacgctttaatgtctggtcctcgatcaccttagcacagcgcttctctgaggagaaatgccagctctgccgcatggtgncagggaatggtcggggggaagcctgcagcccaggcctgctacaagtctagtgactgcagccaggcggcctcccctgccgcataaagtgcttgaacagagccgccgtgcctcagaggactgggcctgtcctgggagagagctggagacaggaggcttctgagcaaagccagctccagccctgaaagccacagcagtgccantgcgttcgggccagcgtttcccccgacaaccccaggtttcgggnaaaagcagagttgacccagccaagaacagantgtttgacctcctggggccgagtggggcaaacagttccttgcacacaacacacaggagttnttgggggaacttgattntttttt

SEQ ID NO: 1032 - DNA, 471 bp, Artificial Sequence
  Description of Artificial sequences:primer
  misc_feature (1)..(471): 5' terminal sequence from clone image:42118. purinergic receptor p2x, ligand-gated ion channel, 4(P2RX4) gene.
  misc_feature (36)..(37): n is a, c, g, or t
  misc_feature (42)..(42): n is a, c, g, or t
  misc_feature (340)..(340): n is a, c, g, or t
  misc_feature (411)..(411): n is a, c, g, or t
  misc_feature (448)..(448): n is a, c, g, or t
  misc_feature (468)..(468): n is a, c, g, or t
cgggcggcgggtcatggcgggctgctgcgcccgctnngcctntacctgttcgagtacgacacgccgcgcatcgtgctcatccgcagccgcaaagtggggctcatgaaccgcgccgtgcaactgctcatcctggcctacgtcatcggacctgcttttttaaaggctgcagaaaacttcactcttttggttaagaacaacatctggtatcccaaatttaatttcagcaagaggaatatccttcccaacatcaccactacttacctcaagtcgtgcatttatgatgctaaaacagatcccttctgccccatattccgtcttgggcaaaatagtgggagaacgnagggacacagttttccagggacatgggccgtgggaggtgagggcattcatggggcatccagggtccaactnggggacttgcaacctggggacagaggccgcctccctnttgctttgcccaggtaattnctt

SEQ ID NO: 1033 - DNA, 2043 bp, Artificial Sequence
  Description of Artificial sequences:primer
  misc_feature (1)..(2043): purinergic receptor p2x, ligand-gated ion channel, 4(P2RX4) gene.
aagtgctgggatgacaggtgtgagccaccgcccccggcccctcgcccgccttttgaaggagcctttcgtcctcaagggcgaggccactccccccccgcgagttccatgccccctagagggtcatcgttcccgacggggaggtggcgccctcccccgggccccgggccccgaccgcccgtgctgcctccttccgggccctcctccgcgatgacggcgccgccagcaggccaggcggactgggcggggctccgagcggggactgggacccagaccgactaggggactgggagcgggcggcgcggccatggcgggctgctgcgccgcgctggcggccttcctgttcgagtacgacacgccgcgcatcgtgctcatccgcagccgcaaagtggggctcatgaaccgcgccgtgcaactgctcatcctggcctacgtcatcgggtgggtgtttgtgtgggaaaagggctaccaggaaactgactccgtggtcagctccgttacgaccaaggtcaagggcgtggctgtgaccaacacttctaaacttggattccggatctgggatgtggcggattatgtgataccagctcaggaggaaaactccctcttcgtcatgaccaacgtgatcctcaccatgaaccagacacagggcctgtgccccgagattccagatgcgaccactgtgtgtaaatcagatgccagctgtactgccggctctgccggcacccacagcaacggagtctcaacaggcaggtgcgtagctttcaacgggtctgtcaagacgtgtgaggtggcggcctggtgcccggtggaggatgacacacacgtgccacaacctgcttttttaaaggctgcagaaaacttcactcttttggttaagaacaacatctggtatcccaaatttaatttcagcaagaggaatatccttcccaacatcaccactacttacctcaagtcgtgcatttatgatgctaaaacagatcccttctgccccatattccgtcttggcaaaatagtggagaacgcaggacacagtttccaggacatggccgtggagggaggcatcatgggcatccaggtcaactgggactgcaacctggacagagccgcctccctctgcttgcccaggtactccttccgccgcctcgatacacgggacgttgagcacaacgtatctcctggctacaatttcaggtttgccaagtactacagagacctggctggcaacgagcagcgcacgctcatcaaggcctatggcatccgcttcgacatcattgtgtttgggaaggcagggaaatttgacatcatccccactatgatcaacatcggctctggcctggcactgctaggcatggcgaccgtgctgtgtgacatcatagtcctctactgcatgaagaaaagactctactatcgggagaagaaatataaatatgtggaagattacgagcagggtcttgctagtgagctggaccagtgaggcctaccccacacctgggctctccacagccccatcaaagaacagagaggaggaggagggagaaatggccaccacatcaccccagagaaatttctggaatctgattgagtctccactccacaagcactcagggttccccagcagctcctgtgtgttgtgtgcaggatctgtttgcccactcggcccaggaggtcagcagtctgttcttggctgggtcaactctgcttttcccgcaacctggggttgtcgggggagcgctggcccgacgcagtggcactgctgtggctttcagggctggagctggctttgctcagaagcctcctgtctccagctctctccaggacaggcccagtcctctgaggcacggcggctctgttcaagcactttatgcggcaggggaggccgcctggctgcagtcactagacttgtagcaggcctgggctgcaggcttccccccgaccattccctgcagccatgcggcagagctggcatttctcctcagagaagcgctgtgctaaggtgatcgaggaccagacattaaagcgtgattttcttaaaaaaaaaaaaaaaaa

SEQ ID NO: 1034 - DNA, 406 bp, Artificial Sequence
  Description of Artificial sequences:primer
  misc_feature (1)..(406): 3' terminal sequence from clone image:42214. spleen tyrosine kinase(SYK) gene.
  misc_feature (169)..(169): n is a, c, g, or t
  misc_feature (280)..(280): n is a, c, g, or t
  misc_feature (289)..(289): n is a, c, g, or t
  misc_feature (382)..(382): n is a, c, g, or t
  misc_feature (391)..(391): n is a, c, g, or t
tttttttttttttttctttttaaagcctcaaaacatttttattgtcaggaaagcttttcagtggccagggatcagtctcatggccgtagaagcagccaaattcctctgcctttgccttcccttcaggagtcacatgctaaggcatccttgggcatttggaaaaggccgnttggggtgagagtgctctaggccactctgcaatgtccctgggcccgatgagtaacaaatgcaccccgggacccagagaagtggaaagacatgaaagggatttggaaacagntcgtaaaantaacctgtatgaaaatcacacagacaagaaaacaaacaatttccagttaggccccttgggatcctgccattccgttttttcttcccggggatntgcctttgnttttgtgggagggtg

SEQ ID NO: 1035 - DNA, 487 bp, Artificial Sequence
  Description of Artificial sequences:primer
  misc_feature (1)..(487): 5' terminal sequence from clone image:42214. spleen tyrosine kinase(SYK) gene.
  misc_feature (374)..(374): n is a, c, g, or t
  misc_feature (417)..(417): n is a, c, g, or t
  misc_feature (424)..(424): n is a, c, g, or t
  misc_feature (452)..(452): n is a, c, g, or t
aagcagatggtttgttaagagttcttactgtcccatgtcaaaaaatcggcacacagggaaatgttaattttggaggccgtccacaacttccaggttcccatcctgcgacttggtcagcgggtggaataatctcaagaatcaaatcatactccttcccaaagcctggccacagaaagtcctcccctgcccaagggaaccggcaagagagtactgtgtcattcaatccgtatgagccagaacttgcaccctgggctgcagacaaaggcccccagagagaagccctacccatggacacagaggtgtacgagagccccttacgcgggaccccgagggagatcaggcccaaggaggttttacctgggaccgaaagctgnttgacgctgggaggacaaagaattggggttttggttatttttnggaattnttgaaaaaaggggttatttaccaattgnaaaaaatttgttgaaaaccttggttttgaaattat

SEQ ID NO: 1036 - DNA, 2681 bp, Artificial Sequence
  Description of Artificial sequences:primer
  misc_feature (1)..(2681): spleen tyrosine kinase(SYK) gene.
ggcacgaggaggaagagccgcgggcccggcggctgaggccaccccggcggcggctggagagcgaggaggagcgggtggccccgcgctgcgcccgccctcgcctcacctggcgcaggtggacacctgcgcaggtgtgtgccctccggcccctgaagcatggccagcagcggcatggctgacagcgccaaccacctgcccttctttttcggcaacatcacccgggaggaggcagaagattacctggtccaggggggcatgagtgatgggctttatttgctgcgccagagccgcaactacctgggtggcttcgccctgtccgtggcccacgggaggaaggcacaccactacaccatcgagcgggagctgaatggcacctacgccatcgccggtggcaggacccatgccagccccgccgacctctgccactaccactcccaggagtctgatggcctggtctgcctcctcaagaagcccttcaaccggccccaaggggtgcagcccaagactgggccctttgaggatttgaaggaaaacctcatcagggaatatgtgaagcagacatggaacctgcagggtcaggctctggagcaggccatcatcagtcagaagcctcagctggagaagctgatcgctaccacagcccatgaaaaaatgccttggttccatggaaaaatctctcgggaagaatctgagcaaattgtcctgataggatcaaagacaaatggaaagttcctgatccgagccagagacaacaacggctcctacgccctgtgcctgctgcacgaagggaaggtgctgcactatcgcatcgacaaagacaagacagggaagctctccatccccgagggaaagaagttcgacacgctctggcagctagtcgagcattattcttataaagcagatggtttgttaagagttcttactgtcccatgtcaaaaaatcggcacacagggaaatgttaattttggaggccgtccacaacttccaggttcccatcctgcgacttggtcagcgggtggaataatctcaagaatcaaatcatactccttcccaaagcctggccacagaaagtcctcccctgcccaagggaaccggcaagagagtactgtgtcattcaatccgtatgagccagaacttgcaccctgggctgcagacaaaggcccccagagagaagccctacccatggacacagaggtgtacgagagcccctacgcggaccctgaggagatcaggcccaaggaggtttacctggaccgaaagctgctgacgctggaagacaaagaactgggctctggtaattttggaactgtgaaaaagggctactaccaaatgaaaaaagttgtgaaaaccgtggctgtgaaaatactgaaaaacgaggccaatgaccccgctcttaaagatgagttattagcagaagcaaatgtcatgcagcagctggacaacccgtacatcgtgcgcatgatcgggatatgcgaggccgagtcctggatgctagttatggagatggcagaacttggtcccctcaataagtatttgcagcagaacagacatgtcaaggataagaacatcatagaactggttcatcaggtttccatgggcatgaagtacttggaggagagcaattttgtgcacagagatctggctgcaagaaatgtgttgctagttacccaacattatgccaagatcagtgatttcggactctccaaagcactgcgtgctgatgaaaactactacaaggcccagacccatggaaagtggcctgtcaagtggtacgctccggaatgcatcaactactacaagttctccagcaaaagcgatgtctggagctttggagtgttgatgtgggaagcattctcctatgggcagaagccatatcgagggatgaaaggaagtgaagtcaccgctatgttagagaaaggagagcggatggggtgccctgcagggtgtccaagagagatgtacgatctcatgaatctgtgctggacatacgatgtggaaaacaggcccggattcgcagcagtggaactgcggctgcgcaattactactatgacgtggtgaactaaccgctcccgcacctgtcggtggctgcctttgatcacaggagcaatcacaggaaaatgtatccagaggaattgattgtcagccacctccctctgccagtcgggagagccaggcttggatggaacatgcccacaacttgtcacccaaagcctgtcccaggactcaccctccacaaagcaaaggcagtcccgggagaaaagacggatggcaggatccaaggggctagctggatttgtttgttttcttgtctgtgtgattttcatacaggttatttttacgatctgtttccaaatccctttcatgtctttccacttctctgggtcccggggtgcatttgttactcatcgggcccagggacattgcagagtggcctagagcactctcaccccaagcggccttttccaaatgcccaaggatgccttagcatgtgactcctgaagggaaggcaaaggcagaggaatttggctgcttctacggccatgagactgatccctggccactgaaaagctttcctgacaataaaaatgttttgaggctttaaaaagaaaatcaagtttgaccagtgcagtttctaagcatgtagccagttaaggaaagaaagaaaaaaaaaaaaaaaaaa

SEQ ID NO: 1037 - DNA, 443 bp, Artificial Sequence
  Description of Artificial sequences:primer
  misc_feature (1)..(443): 3' terminal sequence from clone image:427858. glypican 6(GPC6) gene.
ggctgtcaatgctgaacttacagtgttaaagttcatttatttttctctgtttgcttttttgttgaaaatgtagctgtcttggggtttggcccgattttacaaggaaaattattttctttcttccttttttattttaaatgagaaaaaaaaaaaccctcacaacgtgagattcctttacttctgcagcataaaagcaaatgaaggtaagaaaatctcctggtacgaaaaatttgagtaagaattctctctagaataaacaaggtccccacagatagctgaaggaaagaggaagcagttcagtctggcacccggtactctttgggaaaacaaaaagggaggcagattgcattactgctctcttctcatagaaaacggtaagtttttgtggcatggtccattgtccaagagtgtaagaaaagaagtgagttggccattcagatagc

SEQ ID NO: 1038 - DNA, 622 bp, Artificial Sequence
  Description of Artificial sequences:primer
  misc_feature (1)..(622): 5' terminal sequence from clone image:427858. glypican 6(GPC6) gene.
  misc_feature (73)..(73): n is a, c, g, or t
  misc_feature (304)..(304): n is a, c, g, or t
  misc_feature (524)..(524): n is a, c, g, or t
  misc_feature (600)..(600): n is a, c, g, or t
  misc_feature (622)..(622): n is a, c, g, or t
aagcgtgacagcgggcacgtccaacgaggaggaatgctggaacgggcacagcaaagccagatacttgcctganatcatgaatgatgggctcaccaaccagatcaataatcccgaggtggatgtggacatcactcggcctgacactttcatcagacagcagattatggctctccgtgtgatgaccaacaaactaaaaaacgcctacaatggcaatgatgtcaatttccaggacacaagtgatgaatccagtggctcagggagtggcagtgggtgcatggatgacgtgtgtcccacggagtttgangtttgtcaccacagaggcccccgcagtggatcccgaccggagagaggtggactcttctgcagcccagcgttggccactccctgctctcctggtctctcacctgcattgtcctgggcactgcagagactgtgcagataatcttgggtttttggtcagatgaaactgcattttagctatctgaatggccaactcacttcttttcttacactcttggacaatngaccatgccacaaaaacttaccgttttctatgagaagagagcagtaatgcaatctgcctccccttttggtttcccnaagagtaccgggtgccagactn

SEQ ID NO: 1039 - DNA, 2760 bp, Artificial Sequence
  Description of Artificial sequences:primer
  misc_feature (1)..(2760): glypican 6(GPC6) gene.
ccaggatttctctcttcctatttcaggaggactctcacaggctcccacagcctgtgttaagctgaggtttcccctagatctcgtatatccccaacacatacctccacgcacacacatccccaagaacctcgagctcacaccaacagacacacgcgcgcatacacactcgctctcgcttgtccatctccctcccgggggagccggcgcgcgctcccacctttgccgcacactccggcgagccgagcccgcagcgctccaggattctgcggctcggaactcggattgcagctctgaacccccatggtggttttttaaacacttcttttccttctcttcctcgttttgattgcaccgtttccatctgggggctagaggagcaaggcagcagccttcccagccagcccttgttggcttgccatcgtccatctggcttataaaagtttgctgagcgcagtccagagggctgcgctgctcgtcccctcggctggcagaagggggtgacgctgggcagcggcgaggagcgcgccgctgcctctggcgggctttcggcttgaggggcaaggtgaagagcgcaccggccgtggggtttaccgagctggatttgtatgttgcaccatgccttcttggatcggggctgtgattcttcccctcttggggctgctgctctccctccccgccggggcggatgtgaaggctcggagctgcggagaggtccgccaggcgtacggtgccaagggattcagcctggcggacatcccctaccaggagatcgcaggggaacacttaagaatctgtcctcaggaatatacatgctgcaccacagaaatggaagacaagttaagccaacaaagcaaactcgaatttgaaaaccttgtggaagagacaagccattttgtgcgcaccacttttgtgtccaggcataagaaatttgacgaatttttccgagagctcctggagaatgcagaaaagtcactaaatgatatgtttgtacggacctatggcatgctgtacatgcagaattcagaagtcttccaggacctcttcacagagctgaaaaggtactacactgggggtaatgtgaatctggaggaaatgctcaatgacttttgggctcggctcctggaacggatgtttcagctgataaaccctcagtatcacttcagtgaagactacctggaatgtgtgagcaaatacactgaccagctcaagccatttggagacgtgccccggaaactgaagattcaggttacccgcgccttcattgctgccaggacctttgtccaggggctgactgtgggcagagaagttgcaaaccgagtttccaaggtcagcccaaccccagggtgtatccgtgccctcatgaagatgctgtactgcccatactgtcgggggcttcccactgtgaggccctgcaacaactactgtctcaacgtcatgaagggctgcttggcaaatcaggctgacctcgacacagagtggaatctgtttatagatgcaatgctcttggtggcagagcgactggaggggccattcaacattgagtcggtcatggacccgatagatgtcaagatttctgaagccattatgaacatgcaagaaaacagcatgcaggtgtctgcaaaggtctttcagggatgtggtcagcccaaacctgctccagccctcagatctgcccgctcagctcctgaaaattttaatacacgtttcaggccctacaatcctgaggaaagaccaacaactgctgcaggcacaagcttggaccggctggtcacagacataaaagagaaattgaagctctctaaaaaggtctggtcagcattaccctacactatctgcaaggacgagagcgtgacagcgggcacgtccaacgaggaggaatgctggaacgggcacagcaaagccagatacttgcctgagatcatgaatgatgggctcaccaaccagatcaataatcccgaggtggatgtggacatcactcggcctgacactttcatcagacagcagattatggctctccgtgtgatgaccaacaaactaaaaaacgcctacaatggcaatgatgtcaatttccaggacacaagtgatgaatccagtggctcagggagtggcagtgggtgcatggatgacgtgtgtcccacggagtttgagtttgtcaccacagaggcccccgcagtggatcccgaccggagagaggtggactcttctgcagcccagcgtggccactccctgctctcctggtctctcacctgcattgtcctggcactgcagagactgtgcagataatcttgggtttttggtcagatgaaactgcattttagctatctgaatggccaactcacttcttttcttacactcttggacaatggaccatgccacaaaaacttaccgttttctatgagaagagagcagtaatgcaatctgcctccctttttgttttcccaaagagtaccgggtgccagactgaactgcttcctctttccttcagctatctgtggggaccttgtttattctagagagaattcttactcaaatttttcgtaccaggagattttcttaccttcatttgcttttatgctgcagaagtaaaggaatctcacgttgtgagggtttttttttttctcatttaaaataaaaaaggaagaaagaaaataattttccttgtaaaatcgggccaaaccccaagacagctacattttcaacaaaaaagcaaacagagaaaaataaatgaactttaacactgtaagttcagcattgacagcc

SEQ ID NO: 1040 - DNA, 467 bp, Artificial Sequence
  Description of Artificial sequences:primer
  misc_feature (1)..(467): 3' terminal sequence from clone image:428103. cd1c antigen, c polypeptide(CD1C) gene.
  misc_feature (465)..(465): n is a, c, g, or t
ttttccaaattagaatttggtttttattaacaaatgtttattatgcagaaagagaaacaatttaaatggagagtcgacgggatggcatcactatattgtactaggctcctgggttgctgggttcttaacacaatgggggagtcagggggaagagtctcacaggatgtcctgatatgagcagtgcttcttaaaccataacacaaggactattagaatcaccaagggcactatcactaccaaggcaatccaatacatggaaaagtggtgtccccagtagaggatgatgtcctggcctcctagactgctgtgtctcactcgacaagacaggccagcaggttcctccagatgccacctccaggatcacctgaagataccatgtcccatcagcattaggaagaatatcaccatgtttagtgcccagttgctcctgttcattccgcatccatgtcacccaaacaggctttngg

SEQ ID NO: 1041 - DNA, 476 bp, Artificial Sequence
  Description of Artificial sequences:primer
  misc_feature (1)..(476): 5' terminal sequence from clone image:428103. cd1c antigen, c polypeptide(CD1C) gene.
  misc_feature (86)..(86): n is a, c, g, or t
  misc_feature (181)..(181): n is a, c, g, or t
  misc_feature (194)..(194): n is a, c, g, or t
  misc_feature (363)..(363): n is a, c, g, or t
  misc_feature (365)..(366): n is a, c, g, or t
  misc_feature (374)..(375): n is a, c, g, or t
attgttggtagaaggaagtcagaatataggtacagagggataagtttgctaagaacagagatcagcaaacagcttttctgagaganagaaacatctgcaaatgacatgctgtttctgcagtttctgctgctagctcttcttctcccaggtggtgacaatgcagacgcatcccaggaacacngtctccttccatntaccccaagatcttctcatttgtcaaccaatcctgggcacgagtcagggctcaggatggctggacgagttgcagactcatggctgggacagtgaatcaggcacaataattttcctgcataactggtccaagggcaacttcagcaatgaagagttgtcagacctagagtngnnccccaagnntctacctctttggattaactcgggagattcaagaccatgcaagtcaagattactcgaaatatccctttgaagtacaggtgaaagcgggctgtgagctgcat

SEQ ID NO: 1042 - DNA, 1207 bp, Artificial Sequence
  Description of Artificial sequences:primer
  misc_feature (1)..(1207): cd1c antigen, c polypeptide(CD1C) gene.
acagagatcagcaaacagcttttctgagagaaagaaacatctgcaaatgacatgctgtttctgcagtttctgctgctagctcttcttctcccaggtggtgacaatgcagacgcatcccaggaacacgtctccttccatgtcatccagatcttctcatttgtcaaccaatcctgggcacgaggtcagggctcaggatggctggacgagttgcagactcatggctgggacagtgaatcaggcacaataattttcctgcataactggtccaagggcaacttcagcaatgaagagttgtcagacctagagttgttatttcgtttctacctctttggattaactcgggagattcaagaccatgcaagtcaagattactcgaaatatccctttgaagtacaggtgaaagcgggctgtgagctgcattctggaaagagcccagaaggcttctttcaggtagctttcaacggattagatttactgagtttccagaatacaacatgggtgccatctccaggctgtggaagtttggcccaaagtgtctgtcatctactcaatcatcagtatgaaggcgtcacagaaacagtgtataatctcataagaagcacttgcccccgatttctcttgggtctcctggatgcagggaagatgtatgtacacaggcaagtgaggccagaagcctggctgtccagtcgccccagccttgggtctggccagctgttgctggtttgtcatgcctccggcttctacccaaagcctgtttgggtgacatggatgcggaatgaacaggagcaactgggcactaaacatggtgatattcttcctaatgctgatgggacatggtatcttcaggtgatcctggaggtggcatctgaggagcctgctggcctgtcttgtcgagtgagacacagcagtctaggaggccaggacatcatcctctactggggacaccactcttccatgaattggattgccttggtagtgatagtgcccttggtgattctaatagtccttgtgttatggtttaagaagcactgctcatatcaggacatcctgtgagactcttccccctgactcccccattgtgttaagaacccagcaacccaggagcctagtacaatatagtgatgccatcccgtcgactctccatttaaattgtttctctttctgcataataaacatttgttaataaaaaccaaaaaaaaaaaaaaaa

SEQ ID NO: 1043 - DNA, 442 bp, Artificial Sequence
  Description of Artificial sequences:primer
  misc_feature (1)..(442): 3' terminal sequence from clone image:429544. cytochrome c, somatic(CYCS) gene.
  misc_feature (360)..(360): n is a, c, g, or t
aaaatttgtgtatatctccgttactttaatccttttaagttggcaaaagcaccattcccaatcaaatacacagttctacagttttgtttctgaatggctgtttaaagacaatcctaaattataacttagtttgacttagatttgtaaagaattcaagagtgaagtttaacttgctactattttaaaagcatgtgaccttatagatctgtaagatgtgagaggtgttgaataatctttaatattacacataaaccacactaaaatgcctttcaataagtaaaagaaaccattttaaatacaggaaattataattagattggcatagttaaggccaaaactatagacattgctaccttattnatcttcaacccttgcctttaagaggcaaatgaacatgaacacaaaacacaggtgaatcttgcttggttctaagacagtgaag

SEQ ID NO: 1044 - DNA, 483 bp, Artificial Sequence
  Description of Artificial sequences:primer
  misc_feature (1)..(483): 5' terminal sequence from clone image:429544. cytochrome c, somatic(CYCS) gene.
  misc_feature (369)..(369): n is a, c, g, or t
  misc_feature (396)..(396): n is a, c, g, or t
gacgtccggcttcggagcgggagtgttcgttgtgccagcgactaaaaagagaattaaatatgggtgatgttgagaaaggcaagaagatttttattatgaagtgttcccagtgccacaccgttgaaaagggaggcaagcacaagactgggccaaatctccatggtctctttgggcggaagacaggtcaggcccctggatactcttacacagccgccaataagaacaaaggcatcatctggggagaggatacactgatggagtatttggagaatcccaagaagtacatccctggaacaaaaatgatctttgtcggcattaagaagaaggaagaaagggcagacttaatagcttatctcaaaaaagctactnatgagtaataatttggccactgccttnatttattacaaaacagaaatgtctcatgacttttttatgtgtaccatcctttaatagatctcatacaccagaattcagatcatgaat

SEQ ID NO: 1045 - DNA, 362 bp, Artificial Sequence
  Description of Artificial sequences:primer
  misc_feature (1)..(362): 3' terminal sequence from clone image:430090. tumor necrosis factor receptor superfamily, member 7(TNFRSF7) gene.
  misc_feature (107)..(107): n is a, c, g, or t
  misc_feature (157)..(157): n is a, c, g, or t
  misc_feature (212)..(212): n is a, c, g, or t
gtggtcatctgtcactttattttgcccgtcttgtagcatgtgggtctttcgcagcaggaagtgtgttttacaaccagagcccccgccctcctgcagcgcaggcgcanctggctgggctcctgcttcccactctccacctcatccatatttgtcctcngtccctgccagtctcgaaaaggcactctgtcacgtgtacacaggaaagggccctnacaagaggatgggactgcaagttgtggctgccaggtctcactctcccttggatgggtcggcgggggttgggggtggaaggccagggggctgtaagttgcaaggttccccggcaaggttggctggggcttcaaggggggggaggcaagggc

SEQ ID NO: 1046 - DNA, 309 bp, Artificial Sequence
  Description of Artificial sequences:primer
  misc_feature (1)..(309): 5' terminal sequence from clone image:430090. tumor necrosis factor receptor superfamily, member 7(TNFRSF7) gene.
  misc_feature (28)..(28): n is a, c, g, or t
  misc_feature (35)..(36): n is a, c, g, or t
  misc_feature (168)..(168): n is a, c, g, or t
  misc_feature (181)..(181): n is a, c, g, or t
  misc_feature (206)..(206): n is a, c, g, or t
  misc_feature (232)..(232): n is a, c, g, or t
  misc_feature (236)..(236): n is a, c, g, or t
  misc_feature (246)..(246): n is a, c, g, or t
  misc_feature (250)..(250): n is a, c, g, or t
  misc_feature (259)..(259): n is a, c, g, or t
  misc_feature (261)..(262): n is a, c, g, or t
  misc_feature (276)..(276): n is a, c, g, or t
  misc_feature (291)..(291): n is a, c, g, or t
  misc_feature (297)..(299): n is a, c, g, or t
  misc_feature (307)..(307): n is a, c, g, or t
gggaccatggcacggcacatccctggtngctgtcnntctggggaccctggtggggctctcagctactccagcccccaagagctgcccagagaggactactgggctcagggaaagctgtgctgccagatgtgtgagccaggaacattcctcgtgaaggactgtgaccancatagaaaggctnctcagtgtgatccttgcataccgtnggtctccttctctccttgaccaccanaccnggccccactntganagcttgtcngnnacttgtaactctcngtcttctccgtgtgncaactnnnaccatcantg

SEQ ID NO: 1047 - DNA, 1323 bp, Artificial Sequence
  Description of Artificial sequences:primer
  misc_feature (1)..(1323): tumor necrosis factor receptor superfamily, member 7(TNFRSF7) gene.
gtggaggttgctgctatgagagagaaaaaaaaaaacagccacaatagagattctgccttcaaaggttggcttgccacctgaagcagccactgcccagggggtgcaaagaagagacagcagcgcccagcttggaggtgctaactccagaggccagcatcagcaactgggcacagaaaggagccgcctgggcagggaccatggcacggccacatccctggtggctgtgcgttctggggaccctggtggggctctcagctactccagcccccaagagctgcccagagaggcactactgggctcagggaaagctgtgctgccagatgtgtgagccaggaacattcctcgtgaaggactgtgaccagcatagaaaggctgctcagtgtgatccttgcataccgggggtctccttctctcctgaccaccacacccggccccactgtgagagctgtcggcactgtaactctggtcttctcgttcgcaactgcaccatcactgccaatgctgagtgtgcctgtcgcaatggctggcagtgcagggacaaggagtgcaccgagtgtgatcctcttccaaacccttcgctgaccgctcggtcgtctcaggccctgagcccacaccctcagcccacccacttaccttatgtcagtgagatgctggaggccaggacagctgggcacatgcagactctggctgacttcaggcagctgcctgcccggactctctctacccactggccaccccaaagatccctgtgcagctccgattttattcgcatccttgtgatcttctctggaatgttccttgttttcaccctggccggggccctgttcctccatcaacgaaggaaatatagatcaaacaaaggagaaagtcctgtggagcctgcagagccttgtcgttacagctgccccagggaggaggagggcagcaccatccccatccaggaggattaccgaaaaccggagcctgcctgctccccctgagccagcacctgcgggagctgcactacagccctggcctccacccccaccccgccgaccatccaagggagagtgagacctggcagccacaactgcagtcccatcctcttgtcagggccctttcctgtgtacacgtgacagagtgccttttcgagactggcagggacgaggacaaatatggatgaggtggagagtgggaagcaggagcccagccagctgcgcctgcgctgcaggagggcgggggctctggttgtaaaacacacttcctgctgcgaaagacccacatgctacaagacgggcaaaataaagtgacagatgaccaccctgcaaaaaaaaaaaaaaaaaa

SEQ ID NO: 1048 - DNA, 418 bp, Artificial Sequence
  Description of Artificial sequences:primer
  misc_feature (1)..(418): 3' terminal sequence from clone image:43207. Similar to protein sp:o00451 nrtr_human neurturin receptor alpha precursor (nrtnr-alpha) (tgf-beta related neurotrophic factor receptor 2).
  misc_feature (95)..(95): n is a, c, g, or t
  misc_feature (244)..(244): n is a, c, g, or t
  misc_feature (285)..(285): n is a, c, g, or t
  misc_feature (325)..(325): n is a, c, g, or t
  misc_feature (343)..(343): n is a, c, g, or t
  misc_feature (380)..(380): n is a, c, g, or t
  misc_feature (386)..(386): n is a, c, g, or t
  misc_feature (391)..(391): n is a, c, g, or t
tttttttttttgggaaaaacaattttttttttgcaaggtgtgtgtgtgtctgtgtgtgtttccatttcgtcaggcggctgttcttgtctgcgtanttttcaaaaatcttctgactcggttcccacagcctacaaggcctgtttcagcatcaggacagacagcacggtcaaggcagccgacggtctggctctgctggggcctgagttaggtttgatcaccttgttactccctgggatgatatttntcgtgagctctgtgaagcacatgcttaactctttggagttnttggccttcagcccctgctcctgggacagaacgtgcaggntgggtgatgacactgggnccccaaggctgggtactgtcactgagggtcatctggncaaagnaaggncgtttttctccacccgaggggccgggg

SEQ ID NO: 1049 - DNA, 521 bp, Artificial Sequence
  Description of Artificial sequences:primer
  misc_feature (1)..(521): 5' terminal sequence from clone image:43207. Similar to protein sp:o00451 nrtr_human neurturin receptor alpha precursor (nrtnr-alpha) (tgf-beta related neurotrophic factor receptor 2).
  misc_feature (228)..(228): n is a, c, g, or t
  misc_feature (333)..(333): n is a, c, g, or t
  misc_feature (384)..(384): n is a, c, g, or t
  misc_feature (416)..(416): n is a, c, g, or t
  misc_feature (463)..(463): n is a, c, g, or t
  misc_feature (484)..(484): n is a, c, g, or t
  misc_feature (500)..(500): n is a, c, g, or t
  misc_feature (505)..(505): n is a, c, g, or t
  misc_feature (510)..(510): n is a, c, g, or t
caaccattgcctgggatgctgccaaggcctgcaacctgaatgacaactgcaagaagctgcgctcctcctacatctccatctgcaaccgcgagatctcgcccaccgagcgctgcaaccgccgcaagtgccacaaggccctgcgccagttcttcgaccgggtgcccagcgagtacacctaccgcatgctcttctgctcctgccaagaccaggcgtgcgctgagccgcggncaaaaccatcctgcccagctgctcctatgaggacaaggagaagcccaactgcctgggacctgcgtggcgtgtgccgggactgaccacctgtgtcggtcccggctnggccgactttccatggccaatttgttggagccttcctaccagacgggtcancaggttgccttgcggacaatttaccaggggtnttttggggtttttattgttgggcatggattggggttttgaaattganaattaattttgttgggatttncaggccccattgggcnttgtnggtgnttcccctgggg

SEQ ID NO: 1050 - DNA, 380 bp, Artificial Sequence
  Description of Artificial sequences:primer
  misc_feature (1)..(380): 3' terminal sequence from clone image:43276. chondroitin sulfate galnact-2(GALNACT-2) gene.
  misc_feature (247)..(247): n is a, c, g, or t
  misc_feature (342)..(342): n is a, c, g, or t
  misc_feature (348)..(348): n is a, c, g, or t
  misc_feature (363)..(363): n is a, c, g, or t
  misc_feature (372)..(372): n is a, c, g, or t
ttttttttttggtaataaaatactttattggtaccatttaataaatgtcaaaaacgtatagcatttccattgcttagcttccatctttaaacttaaagctagttaaaaacaacaggaacaaaagtaaactcatttgattctctcaaaaaacaagctgtaacttacctttgcaaataattaagttctctcactttaaatatcgtaattcactgggtcttcataataaataattataataatatataanaggagacagtgggcctgaattattttgcagaggaacatttcacacatcttttaaaaaaatcactaaactacccacaacttaaaacttgttagggnttattnggggtaggggggttnttggtaatntttggatt

SEQ ID NO: 1051 - DNA, 3745 bp, Artificial Sequence
  Description of Artificial sequences:primer
  misc_feature (1)..(3745): chondroitin sulfate galnact-2(GALNACT-2) gene.
cggcggcgggcccaaggcgtgaggcgccgcccgggtgtccccgcggcgcaggaggcggtggagcgcagagcgggcgagcgcgaaaaatcactaccaatataatggattttatatatcagattgctttattctggatatcatggtaacaatacagaaagtatacataatttcccatttctgcaagtagtcatgactgctgaagaaagaaaaacttaaagctacggcagaattattttatggaaattctgattttgtttttaatttttgataactttttactaaaggtatgaacacacaaagagcttattttgttaggcaaatacacattaataagaatgcctagaagaggactgattcttcacacccggacccactggttgctgttgggccttgctttgctctgcagtttggtattatttatgtacctcctggaatgtgccccccagactgatggaaatgcatctcttcctggtgttgttggggaaaattatggtaaagagtattatcaagccctcctacaggaacaagaagaacattatcagaccagggcaaccagtctgaaacgccaaattgcccaactaaaacaagaattacaagaaatgagtgagaagatgcggtcactgcaagaaagaaggaatgtaggggctaatggcataggctatcagagcaacaaagagcaagcacctagtgatcttttagagtttcttcattcccaaattgacaaagctgaagttagcataggggccaaactacccagtgagtatggggtcattccctttgaaagttttaccttaatgaaagtatttcaattggaaatgggtctcactcgccatcctgaagaaaagccagttagaaaagacaaacgagatgaattggtggaagttattgaagcgggcttggaggtcattaataatcctgatgaagatgatgaacaagaagatgaggagggtccccttggagagaaactgatatttaatgaaaatgacttcgtagaaggttattatcgcactgagagagataagggcacacagtatgaactcttttttaagaaagcagaccttacggaatatagacatgtgaccctcttccgcccttttggacctctcatgaaagtgaagagtgagatgattgacatcactagatcaattattaatatcattgtgccacttgctgaaagaactgaagcatttgtacaatttatgcagaacttcagggatgtttgtattcatcaagacaagaagattcatctcacagtggtgtattttggtaaagaaggactgtctaaagtcaagtctatcctagaatctgtcaccagtgagtctaattttcacaattacaccttggtctcattgaatgaagaatttaatcgtggacgaggactaaatgtgggtgcccgagcttgggacaagggagaggtcttgatgtttttctgtgatgttgatatctatttctcagccgaattccttaacagctgccggttaaatgctgagccaggtaagaaggtgttttaccctgtggtgttcagtctttacaatcctgccattgtttatgccaaccaggaagtgccaccacctgtggagcagcagctggttcacaaaaaggattctggcttttggcgagattttggctttggaatgacttgtcagtatcgttcagatttcctgaccattggtggatttgacatggaagtgaaaggttggggtggagaagatgttcatctttatcgaaaatacttacatggtgacctcattgtgattcggactccggttcctggtcttttccacctctggcatgaaaagcgctgtgctgatgagctgacccccgagcagtaccgcatgtgcatccagtctaaagccatgaatgaggcctctcactcccacctgggaatgctggtcttcagggaggaaatagagacgcatcttcataaacaggcatacaggacaaacagtgaagctgttggttgaaatcataattaatgcgttactgtatgaaccacaaaacagcactatttatttagccttacttctacttccagatgcagtgcctcttttggagaagacatgtttatttttcatgttctttctgacattactttagcaattcaacttgatgtgagaagaaaaaacaaatgtttcaacacaaaatctctgttttgtgagaatactgcactatggaataattgacaaattgaaatctcatatttgtcccaaaagttgttttgagttagttctacctggtgcccatgttctgattgtgtgtgggattgcatggtgtcctgattgcatctaggtggagcggatggaatgtgctgggccactgttgggtggagagcagcacattcttacagaggagatggagcgttatgagcatagtatgtggataggtatcttcacctgcccgcccctgagtcagcctccttgacttgatagcttgaagaatccttttccactgaaatagaggataattaattgacacatctgaaatccccaatcaatcaatcaagagaaaggtagaactaaaaactccttaacttactgttgcttacacccctgaaagtctgtttttaagcaaatgggtaatagtagaaaataggttagaatctatggcttgattaaaaatatgttattacattatcatgttcaggattaggattagtagtcagttgctgtaaactattttgaacaaacagaaaagaacacggaaacatttttaacagagcatttaattatgttggaatacaggatcctagctctgtctgggaacattagtttatgtgagccagctctatcagggtcttcccatggtggttcagaatagatgagcatagcatggttttgtttgtttttgctttcaattttctaatttggcatggatccatatgtatttactatcctttttctaatatattaatatatgctacatttgtatttgcattactataatactttgagttgaaaaagagtttcattgtggagagaaaaagcaaatggtatgccacaagatcactctgatttgagaaaagggaggaggggaagatagtctgaatggaaatctgaaatacggaatgttttagagaaatatgtcacttgcatatagaatgttttaattgaggtataaattaatgagacaaagtgaaaaagaaattatattcagataggactgcactacattatttgtcacacatggatctgttaccatcaggtcaattcctagtatgcataaattttttaacccttttaaaagagacctatgttgaaaacccctgaaaattcactgaagaaaaatcattactctttttctcagtaaatcatatcatctgaaatattacaaatttcaaatttctaggtgctatattaattcaatattacaataactcttacctaattattcttacaagttttaagttgtggtagtttagtgatttttttaaaagatgtgtgaaatgttctctgcaaaataattcaggccactgtctccttttatatattattataattatttattatgaagaccagtgaattacgatatttaaagtgagagaacttaattatttgcaaaggtaagttacagcttgttttttgagagaatcaaatgagtttacttttgttcctgttgtttttaactagctttaagtttaaagatggaagctaagcaatggaaatgctatacgtttttgacatttattaaatggtaccaataaagtattttattaccaaaagttaaaaaaaaaaaaaaaaaaaaaaaa

SEQ ID NO: 1052 - DNA, 533 bp, Artificial Sequence
  Description of Artificial sequences:primer
  misc_feature (1)..(533): 3' terminal sequence from clone image:433155. coagulation factor v (proaccelerin, labile factor)(F5) gene.
  misc_feature (477)..(477): n is a, c, g, or t
cgtgtcttaatgagaaactggcttttcttcagtctactctttcctccatcctgtcttacttgtagagatttatgtctaactctaggaaactttgggtggccactctgctttccaggcttgttggcaagaggggtgctttctccccaagcacgtgaggcattctgggggctgatcagccaattgttaacagctgtgtcttcatcagtatcttggattatttcatagctacctttctcagaagccaaatgccatctcccaaccaaaatcttagatgagttactttgttttaagagtaacagatcactaggagggtccttccagggcctcattctggaaggagaaccagtgtcttggctaggaaggtcctcccagggcctcattccggaagagaaccagtgtcttggcttaggtgtctcccaactttatgtgctagtaatttcatccaggagaacctgtgctttgctgcttgatctcttnctaccttggggtccttatgcttagcatgttcttgacttttgaattctccagcacca

SEQ ID NO: 1053 - DNA, 6914 bp, Artificial Sequence
  Description of Artificial sequences:primer
  misc_feature (1)..(6914): coagulation factor v (proaccelerin, labile factor)(F5) gene.
tcattgcagctgggacagcccggagtgtggttagcagctcggcaagcgctgcccaggtcctggggtggtggcagccagcgggagcaggaaaggaagcatgttcccaggctgcccacgcctctgggtcctggtggtcttgggcaccagctgggtaggctgggggagccaagggacagaagcggcacagctaaggcagttctacgtggctgctcagggcatcagttggagctaccgacctgagcccacaaactcaagtttgaatctttctgtaacttcctttaagaaaattgtctacagagagtatgaaccatattttaagaaagaaaaaccacaatctaccatttcaggacttcttgggcctactttatatgctgaagtcggagacatcataaaagttcactttaaaaataaggcagataagcccttgagcatccatcctcaaggaattaggtacagtaaattatcagaaggtgcttcttaccttgaccacacattccctgcagagaagatggacgacgctgtggctccaggccgagaatacacctatgaatggagtatcagtgaggacagtggacccacccatgatgaccctccatgcctcacacacatctattactcccatgaaaatctgatcgaggatttcaactctgggctgattgggcccctgcttatctgtaaaaaagggaccctaactgagggtgggacacagaagacgtttgacaagcaaatcgtgctactatttgctgtgtttgatgaaagcaagagctggagccagtcatcatccctaatgtacacagtcaatggatatgtgaatgggacaatgccagatataacagtttgtgcccatgaccacatcagctggcatctgctgggaatgagctcggggccagaattattctccattcatttcaacggccaggtcctggagcagaaccatcataaggtctcagccatcacccttgtcagtgctacatccactaccgcaaatatgactgtgggcccagagggaaagtggatcatatcttctctcaccccaaaacatttgcaagctgggatgcaggcttacattgacattaaaaactgcccaaagaaaaccaggaatcttaagaaaataactcgtgagcagaggcggcacatgaagaggtgggaatacttcattgctgcagaggaagtcatttgggactatgcacctgtaataccagcgaatatggacaaaaaatacaggtctcagcatttggataatttctcaaaccaaattggaaaacattataagaaagttatgtacacacagtacgaagatgagtccttcaccaaacatacagtgaatcccaatatgaaagaagatgggattttgggtcctattatcagagcccaggtcagagacacactcaaaatcgtgttcaaaaatatggccagccgcccctatagcatttaccctcatggagtgaccttctcgccttatgaagatgaagtcaactcttctttcacctcaggcaggaacaacaccatgatcagagcagttcaaccaggggaaacctatacttataagtggaacatcttagagtttgatgaacccacagaaaatgatgcccagtgcttaacaagaccatactacagtgacgtggacatcatgagagacatcgcctctgggctaataggactacttctaatctgtaagagcagatccctggacaggcgaggaatacagagggcagcagacatcgaacagcaggctgtgtttgctgtgtttgatgagaacaaaagctggtaccttgaggacaacatcaacaagttttgtgaaaatcctgatgaggtgaaacgtgatgaccccaagttttatgaatcaaacatcatgagcactatcaatggctatgtgcctgagagcataactactcttggattctgctttgatgacactgtccagtggcacttctgtagtgtggggacccagaatgaaattttgaccatccacttcactgggcactcattcatctatggaaagaggcatgaggacaccttgaccctcttccccatgcgtggagaatctgtgacggtcacaatggataatgttggaacttggatgttaacttccatgaattctagtccaagaagcaaaaagctgaggctgaaattcagggatgttaaatgtatcccagatgatgatgaagactcatatgagatttttgaacctccagaatctacagtcatggctacacggaaaatgcatgatcgtttagaacctgaagatgaagagagtgatgctgactatgattaccagaacagactggctgcagcattaggaattaggtcattccgaaactcatcattgaaccaggaagaagaagagttcaatcttactgccctagctctggagaatggcactgaattcgtttcttcgaacacagatataattgttggttcaaattattcttccccaagtaatattagtaagttcactgtcaataaccttgcagaacctcagaaagccccttctcaccaacaagccaccacagctggttccccactgagacacctcattggcaagaactcagttctcaattcttccacagcagagcattccagcccatattctgaagaccctatagaggatcctctacagccagatgtcacagggatacgtctactttcacttggtgctggagaattcagaagtcaagaacatgctaagcgtaagggacccaaggtagaaagagatcaagcagcaaagcacaggttctcctggatgaaattactagcacataaagttgggagacacctaagccaagacactggttctccttccggaatgaggccctgggaggaccttcctagccaagacactggttctccttccagaatgaggccctgggaggaccctcctagtgatctgttactcttaaaacaaagtaactcatctaagattttggttgggagatggcatttggcttctgagaaaggtagctatgaaataatccaagatactgatgaagacacagctgttaacaattggctgatcagcccccagaatgcctcacgtgcttggggagaaagcacccctcttgccaacaagcctggaaagcagagtggccacccaaagtttcctagagttagacataaatctctacaagtaagacaggatggaggaaagagtagactgaagaaaagccagtttctcattaagacacgaaaaaagaaaaaagagaagcacacacaccatgctcctttatctccgaggacctttcaccctctaagaagtgaagcctacaacacattttcagaaagaagacttaagcattcgttggtgcttcataaatccaatgaaacatctcttcccacagacctcaatcagacattgccctctatggattttggctggatagcctcacttcctgaccataatcagaattcctcaaatgacactggtcaggcaagctgtcctccaggtctttatcagacagtgcccccagaggaacactatcaaacattccccattcaagaccctgatcaaatgcactctacttcagaccccagtcacagatcctcttctccagagctcagtgaaatgcttgagtatgaccgaagtcacaagtccttccccacagatataagtcaaatgtccccttcctcagaacatgaagtctggcagacagtcatctctccagacctcagccaggtgaccctctctccagaactcagccagacaaacctctctccagacctcagccacacgactctctctccagaactcattcagagaaacctttccccagccctcggtcagatgcccatttctccagacctcagccatacaaccctttctccagacctcagccatacaaccctttctttagacctcagccagacaaacctctctccagaactcagtcagacaaacctttctccagccctcggtcagatgcccctttctccagacctcagccatacaaccatttctctagacttcagccagacaaacctctctccagaactcagccatatgactctctctccagaactcagtcagacaaacctttccccagccctcggtcagatgcccatttctccagacctcagccatacaaccctttctctagacttcagccagacaaacctctctccagaactcagtcaaacaaacctttccccagccctcggtcagatgcccctttctccagaccccagccatacaaccctttctctagacctcagccagacaaacctctctccagaactcagtcagacaaacctttccccagacctcagtgagatgcccctctttgcagatctcagtcaaattccccttaccccagacctcgaccagatgacactttctccagaccttggtgagacagatctttccccaaactttggtcagatgtccctttccccagacctcagccaggtgactctctctccagacatcagtgacaccacccttctcccggatctcagccagatatcacctcctccagaccttgatcagatattctacccttctgaatctagtcagtcattgcttcttcaagaatttaatgagtcttttccttatccagaccttggtcagatgccatctccttcatctcctactctcaatgatacttttctatcaaaggaatttaatccactggttatagtgggcctcagtaaagatggtacagattacattgagatcattccaaaggaagaggtccagagcagtgaagatgactatgctgaaattgattatgtgccctatgatgacccctacaaaactgatgttaggacaaacatcaactcctccagagatcctgacaacattgcagcatggtacctccgcagcaacaatggaaacagaagaaattattacattgctgctgaagaaatatcctgggattattcagaatttgtacaaagggaaacagatattgaagactctgatgatattccagaagataccacatataagaaagtagtttttcgaaagtacctcgacagcacttttaccaaacgtgatcctcgaggggagtatgaagagcatctcggaattcttggtcctattatcagagctgaagtggatgatgttatccaagttcgttttaaaaatttagcatccagaccgtattctctacatgcccatggactttcctatgaaaaatcatcagagggaaagacttatgaagatgactctcctgaatggtttaaggaagataatgctgttcagccaaatagcagttatacctacgtatggcatgccactgagcgatcagggccagaaagtcctggctctgcctgtcgggcttgggcctactactcagctgtgaacccagaaaaagatattcactcaggcttgataggtcccctcctaatctgccaaaaaggaatactacataaggacagcaacatgcctgtggacatgagagaatttgtcttactatttatgacctttgatgaaaagaagagctggtactatgaaaagaagtcccgaagttcttggagactcacatcctcagaaatgaaaaaatcccatgagtttcacgccattaatgggatgatctacagcttgcctggcctgaaaatgtatgagcaagagtgggtgaggttacacctgctgaacataggcggctcccaagacattcacgtggttcactttcacggccagaccttgctggaaaatggcaataaacagcaccagttaggggtctggccccttctgcctggttcatttaaaactcttgaaatgaaggcatcaaaacctggctggtggctcctaaacacagaggttggagaaaaccagagagcagggatgcaaacgccatttcttatcatggacagagactgtaggatgccaatgggactaagcactggtatcatatctgattcacagatcaaggcttcagagtttctgggttactgggagcccagattagcaagattaaacaatggtggatcttataatgcttggagtgtagaaaaacttgcagcagaatttgcctctaaaccttggatccaggtggacatgcaaaaggaagtcataatcacagggatccagacccaaggtgccaaacactacctgaagtcctgctataccacagagttctatgtagcttacagttccaaccagatcaactggcagatcttcaaagggaacagcacaaggaatgtgatgtattttaatggcaattcagatgcctctacaataaaagagaatcagtttgacccacctattgtggctagatatattaggatctctccaactcgagcctataacagacctacccttcgattggaactgcaaggttgtgaggtaaatggatgttccacacccctgggtatggaaaatggaaagatagaaaacaagcaaatcacagcttcttcgtttaagaaatcttggtggggagattactgggaacccttccgtgcccgtctgaatgcccagggacgtgtgaatgcctggcaagccaaggcaaacaacaataagcagtggctagaaattgatctactcaagatcaagaagataacggcaattataacacagggctgcaagtctctgtcctctgaaatgtatgtaaagagctataccatccactacagtgagcagggagtggaatggaaaccatacaggctgaaatcctccatggtggacaagatttttgaaggaaatactaataccaaaggacatgtgaagaactttttcaaccccccaatcatttccaggtttatccgtgtcattcctaaaacatggaatcaaagtattgcacttcgcctggaactctttggctgtgatatttactagaattgaacattcaaaaacccctggaagagactctttaagacctcaaaccatttagaatgggcaatgtattttacgctgtgttaaatgttaacagttttccactatttctctttcttttctattagtgaataaaattttatac

SEQ ID NO: 1054 - DNA, 466 bp, Artificial Sequence
  Description of Artificial sequences:primer
  misc_feature (1)..(466): 3' terminal sequence from clone image:43338. Moderately similar to protein ref:np_004491.1 heterogeneous nuclear ribonucleoprotein c.
  misc_feature (11)..(11): n is a, c, g, or t
  misc_feature (327)..(327): n is a, c, g, or t
  misc_feature (428)..(428): n is a, c, g, or t
ttttttttttntttaaaaaccatacatcctttttattgttaagtcataaagaggtatcaaaattaaaagcaaaaattacagggtaagacttaacaaaactactaggagcgtcaaaggaagtgaaaatgggactaggcgcggggcaatatgaattaatgaacatgggaaggacaaggatggggagaacagtgagcatgtgctgaagatactaggggagaggatctggtgaaaaatttgatcttagacaagcgcctaggtaaagaaataatgggataagatttctaaaccccactatgtgcttaagagtcatcctcgccattggcctgntctctgtcatcctctccttcctcagcctctttttcatcatccttgatcaactccagctggtcatccccccgatcttcattatcatcatcatccagtaggtncccctccttcagcagagttcttttgcacccccctcaga

SEQ ID NO: 1055 - DNA, 445 bp, Artificial Sequence
  Description of Artificial sequences:primer
  misc_feature (1)..(445): 3' terminal sequence from clone image:43442. ribosomal protein l15(RPL15) gene.
tttttttttctccttttaaagaatttattaagcctgttataccacacagtatgttttatacactgacatacaactccctaataagataaagcaaagacaaaaaagtttatcttattagaaacaagatacaccaccacttattgtcttcaaacattattgcactttaactttcttaatttgacaaagcattcaagaaacatctgcagactagttttaacagacaaataacacctgtaagcagacatgactgtcctaaattgtttattaagtatgaattttacaaactttacttatattagcggtaacggtgggagctggagagtattgcgccttctccaagctgcccggcgagagcacccaatagtgtggtgggaacttgtgggccctttccaagggccacgggcttcttttcgggcctgcaggatgttcagcccacggcatctcc

SEQ ID NO: 1056 - DNA, 2018 bp, Artificial Sequence
  Description of Artificial sequences:primer
  misc_feature (1)..(2018): ribosomal protein l15(RPL15) gene.
cctttccgtctggcggcagccatcaggtaagccaagatgggtgcatacaagtacatccaggagctatggagaaagaagcagtctgatgtcatgcgctttcttctgagggtccgctgctggcagtaccgccagctctctgctctccacagggctccccgccccacccggcctgataaagcgcgccgactgggctacaaggccaagcaaggttacgttatatataggattcgtgttcgccgtggtggccgaaaacgcccagttcctaagggtgcaacttacggcaagcctgtccatcatggtgttaaccagctaaagtttgctcgaagccttcagtccgttgcagaggagcgagctggacgccactgtggggctctgagagtcctgaattcttactgggttggtgaagattccacatacaaattttttgaggttatcctcattgatccattccataaagctatcagaagaaatcctgacacccagtggatcaccaaaccagtccacaagcacagggagatgcgtgggctgacatctgcaggccgaaagagccgtggccttggaaagggccacaagttccaccacactattggtggctctcgccgggcagcttggagaaggcgcaatactctccagctccaccgttaccgctaatataagtaaagtttgtaaaattcatacttaataaacaatttaggacagtcatgtctgcttacaggtgttatttgtctgttaaaactagtctgcagatgtttcttgaatgctttgtcaaattaagaaagttaaagtgcaataatgtttgaagacaataagtggtggtgtatcttgtttctaataagataaacttttttgtctttgctttatcttattagggagttgtatgtcagtgtataaaacatactgtgtggtataacaggcttaataaattctttaaaaggagagaactgaaactagccctgtagatttgtctggtgcatgtgatgaaacctgcagctttatcggagtgatggcaatgctctgctggtttattttcaagtggctgcgttttttttagtttggcaggtgtagactttttaagttgggctttagaaaatctgggttagcctgaagaaaattgcctcagcctccacagtaccattttaaattcacataaaaggtgaaagctcctggttcagtgccatggcttcatggcattcagtgattagtggtaatggtaaacactggtgtgttttgaagttgaatgtgcgataaaattattagccttaagattggtaagctagcaatgaatgctagggtgggaagctggtgagccagtggccattagataaatacctttcaagtgtgagcttagacgtcaaccctaaaatacttaaccgtaatgctaattgtgatcattatgaatcccttcagtcacattagggggaaagtagttggctataagtacgtcattcttagtccagtcagtcttaaaaacatcttgggttacccactctgtccactcccataggctacagaaaaagtcacaagcgcatggtttccaaccatatgtgttttctgcagttatttctcttgttctggccaaacaaccctaaaaatccttaccattccacaaagttggaccatcacttgtgcacccactttgactatgagtataccaccacattgcatttctgtttgcaccatgtcttccaggagactagactactgttgtccagggtcaatttgagtgtaaagaaaatgtagacaaggaattgcccaattttaaattctgactttgctgacttaatttaaatgctcgttctgaaccaattttctcctatcttctctaggggtttcaaaagactcagttaattgatttccaggaagtactcatagcaagttcataaaagttcttgagacctaaatttcttcacaaaaaaagaaaagatcttaagtcatacattttaattgtgtagaggttgttcaactgaaggaataaatgtctattaaactaaaaaaaaaaaaaaaaaaaaaaaaaaaaa

SEQ ID NO: 1057 - DNA, 454 bp, Artificial Sequence
  Description of Artificial sequences:primer
  misc_feature (1)..(454): 3' terminal sequence from clone image:43493. ribosomal protein s28(RPS28) gene.
  misc_feature (69)..(69): n is a, c, g, or t
  misc_feature (437)..(437): n is a, c, g, or t
  misc_feature (448)..(448): n is a, c, g, or t
  misc_feature (453)..(453): n is a, c, g, or t
ttttttttttttaagacattcaatactttattaaaacaggcttcgtgttagacgagtttccccaactanaggctaaggcgttctgaacaagcttaagatggaccatgctaagctgtgatgtttgggagattaggtgtattaaacacatttcaacttgcaatactttcaacctatgatgtactcaccggaatgtaacccattgtaaactgaggaacacctgtactcaccccactggaagggatgtgggaggaaggtcaagcgcctcttccaggtcagaaggggcagaggttggatacaaaccagggcagcctgggtccatggtaaaagaacctccactaagtgaggctggggctgaatcccacgtttcctggcctcaagggagattgcagcaggcccccctcttttccccttttttccagagcgagtcacccctaggntcccagacagnccacnt

SEQ ID NO: 1058 - DNA, 451 bp, Artificial Sequence
  Description of Artificial sequences:primer
  misc_feature (1)..(451): 5' terminal sequence from clone image:43493. ribosomal protein s28(RPS28) gene.
  misc_feature (62)..(62): n is a, c, g, or t
  misc_feature (64)..(64): n is a, c, g, or t
  misc_feature (448)..(448): n is a, c, g, or t
gacaccagaccgtgtgcagcctatcaagctggccagggtcaccaaggtcctgggcaggacgntntctcagggacagtgcacgcaggtcgcgtggaattcatggacgacacgagccgatccatcatccgcaatgtaaaaggccccgtgcgcgagggcgacgtgctcacccttttggagtcagagcgagaagcccggaggttgcgctgagcttggctgctcgctgggtcttggatgtcgggttcgaccacttggccgatgggaatggtctgtcacagtctgctccttttttttgtccgccacacgtaactgagatgctcctttaaataaagcgtttgtgtttcaagttaactcaggttcttgttctgggttatacgactagggtttctccaggtttcttgagtgggctcccagggcggttcaccgatcctccgcattcttggaaaatctnggg

SEQ ID NO: 1059 - DNA, 398 bp, Artificial Sequence
  Description of Artificial sequences:primer
  misc_feature (1)..(398): ribosomal protein s28(RPS28) gene.
ctctccgccagaccgccgccgcgccgccatcatggacaccagccgtgtgcagcctatcaagctggccagggtcaccaaggtcctgggcaggaccggttctcagggacagtgcacgcaggtgcgcgtggaattcatggacgacacgagccgatccatcatccgcaatgtaaaaggccccgtgcgcgagggcgacgtgctcacccttttggagtcagagcgagaagcccggaggttgcgctgagcttggctgctcgctgggtcttggatgtcgggttcgaccacttggccgatgggaatggtctgtcacaatctgctccttttttttgtccgccacacgtaactgagatgctcctttaaataaagcgtttgtgtttcaagttaaaaaaaaaaaaaaaaaa

SEQ ID NO: 1060 - DNA, 491 bp, Artificial Sequence
  Description of Artificial sequences:primer
  misc_feature (1)..(491): 3' terminal sequence from clone image:43550. lactate dehydrogenase a(LDHA) gene.
  misc_feature (12)..(12): n is a, c, g, or t
  misc_feature (154)..(154): n is a, c, g, or t
  misc_feature (255)..(255): n is a, c, g, or t
  misc_feature (348)..(348): n is a, c, g, or t
  misc_feature (368)..(368): n is a, c, g, or t
  misc_feature (402)..(402): n is a, c, g, or t
  misc_feature (409)..(409): n is a, c, g, or t
  misc_feature (450)..(450): n is a, c, g, or t
  misc_feature (471)..(471): n is a, c, g, or t
tttttttttttntttcactgttcaaggtttattgggggttttagttggtataacacttggatagttggttgcattgtttgtatgtagatctttttacattatatggtaatgtacactactgatatagttcacaaaataagatcctttggaaganttatacacaagacatgatattggatttatacactggatcccagggatgtgactcactgggaaaaaatgttggactaggcatgttcagtgaaggagccaggnagttatataacacacggtaaacatccacctggctcaaggggcaaatgcagtacgtacagcattggcagtggtgcgtcagaggtggcagaactntttcacactaaccagttgangactacacaagattaataccatccagcatcaggntatagcntgtggattttacaaaccatttcttatttctaactttcaggngttgatgtttttcccagtccntcttaaaatttttactgctt

SEQ ID NO: 1061 - DNA, 1661 bp, Artificial Sequence
  Description of Artificial sequences:primer
  misc_feature (1)..(1661): lactate dehydrogenase a(LDHA) gene.
tgctgcagccgctgccgccgattccggatctcattgccacgcgcccccgacgaccgcccgacgtgcattcccgattccttttggttccaagtccaatatggcaactctaaaggatcagctgatttataatcttctaaaggaagaacagaccccccagaataagattacagttgttggggttggtgctgttggcatggcctgtgccatcagtatcttaatgaaggacttggcagatgaacttgctcttgttgatgtcatcgaagacaaattgaagggagagatgatggatctccaacatggcagccttttccttagaacaccaaagattgtctctggcaaagactataatgtaactgcaaactccaagctggtcattatcacggctggggcacgtcagcaagagggagaaagccgtcttaatttggtccagcgtaacgtgaacatatttaaattcatcattcctaatgttgtaaaatacagcccgaactgcaagttgcttattgtttcaaatccagtggatatcttgacctacgtggcttggaagataagtggttttcccaaaaaccgtgttattggaagtggttgcaatctggattcagcccgattccgttacctgatgggggaaaggctgggagttcacccattaagctgtcatgggtgggtccttggggaacatggagattccagtgtgcctgtatggagtggaatgaatgttgctggtgtctctctgaagactctgcacccagatttagggactgataaagataaggaacagtggaaagaggttcacaagcaggtggttgagagtgcttatgaggtgatcaaactcaaaggctacacatcctgggctattggactctctgtagcagatttggcagagagtataatgaagaatcttaggcgggtgcacccagtttccaccatgattaagggtctttacggaataaaggatgatgtcttccttagtgttccttgcattttgggacagaatggaatctcagaccttgtgaaggtgactctgacttctgaggaagaggcccgtttgaagaagagtgcagatacactttgggggatccaaaaggagctgcaattttaaagtcttctgatgtcatatcatttcactgtctaggctacaacaggattctaggtggaggttgtgcatgttgtcctttttatctgatctgtgattaaagcagtaatattttaagatggactgggaaaaacatcaactcctgaagttagaaataagaatggtttgtaaaatccacagctatatcctgatgctggatggtattaatcttgtgtagtcttcaactggttagtgtgaaatagttctgccacctctgacgcaccactgccaatgctgtacgtactgcatttgccccttgagccaggtggatgtttaccgtgtgttatataacttcctggctccttcactgaacatgcctagtccaacattttttcccagtgagtcacatcctgggatccagtgtataaatccaatatcatgtcttgtgcataattcttccaaaggatcttattttgtgaactatatcagtagtgtacattaccatataatgtaaaaagatctacatacaaacaatgcaaccaactatccaagtgttataccaactaaaacccccaataaaccttgaacagtg

SEQ ID NO: 1062 - DNA, 455 bp, Artificial Sequence
  Description of Artificial sequences:primer
  misc_feature (1)..(455): 3' terminal sequence from clone image:43638. ran, member ras oncogene family(RAN) gene.
  misc_feature (301)..(301): n is a, c, g, or t
  misc_feature (389)..(389): n is a, c, g, or t
  misc_feature (427)..(427): n is a, c, g, or t
  misc_feature (447)..(447): n is a, c, g, or t
ttttttttttttttttagatatttgaaatacaactttattctgattctaaacgaaaaggaatgggaatgacagtaacaaacaagatttcaccactgaatattgtgatgtgactgcagcagtcttatatatgaaactcaaggaatcaactgcgttccaaaacagctaaatatgcaggtccaaacaatgaagttattttttaaactgccacattcactccgaagcccactcatctccttcagcatcccacagatgaagcacatgttccgcttagctagataataatgaggtgggcacacacgntggcaccgctggacatcacagggacagctgcctattaaaactaggacttctggacgctggggctccagcttgcatttcttcacaggtncattcatgccttcattccggggaggaggcagtttgttnggaggcaaccttttaaggtncgtggctc

SEQ ID NO: 1063 - DNA, 501 bp, Artificial Sequence
  Description of Artificial sequences:primer
  misc_feature (1)..(501): 5' terminal sequence from clone image:43638. ran, member ras oncogene family(RAN) gene.
  misc_feature (376)..(376): n is a, c, g, or t
  misc_feature (453)..(453): n is a, c, g, or t
  misc_feature (470)..(470): n is a, c, g, or t
  misc_feature (475)..(475): n is a, c, g, or t
  misc_feature (492)..(492): n is a, c, g, or t
  misc_feature (497)..(497): n is a, c, g, or t
aagaatttcccccaaaagaatcctttaaccaaaaagttgtggtttcttgccttgctaactgtaccatagttattcctgcaggtgaatatataggctttatctgggttatttatttatttaatttttttttgagacagggtttcgctctgttgcccaacctggagtgcagcttccgcctcctaagctcaagccatcctcttacctcagcatcctgagtagcttggactataggcacgtgccactatgcctgactaatttttgtatttttttgtagagatggggattcaccatgttgcccatgctggtctgggaactcatgagctcaggtgatccacccaccttcagcctcttcaaagtgctggggattacagacgtngaggccacattgcttgggcctatctgggatttttttaaggacagggattaatgtttttcccagtataggccaggccntttaaaggaccttctgnaggangtgttttcagggggccnaaccntcag

SEQ ID NO: 1064 - DNA, 475 bp, Artificial Sequence
  Description of Artificial sequences:primer
  misc_feature (1)..(475): 3' terminal sequence from clone image:43760. protein phosphatase 2 (formerly 2a), catalytic subunit, alpha isoform(PPP2CA) gene.
  misc_feature (421)..(421): n is a, c, g, or t
  misc_feature (439)..(439): n is a, c, g, or t
  misc_feature (462)..(462): n is a, c, g, or t
ttttttttacctgaaaacatgctgttttattaaaacaaaacccaaagacttaaatctcaagttatatggttttacaattaagtcttactgaagcagcacagatttcctttcttacaaacaagttaatatgcaggaagaacccacaaagtgcacaccaacaatgtgacaaattgtaatatgtgaaatacaaataaatcctggaagttaatctgaaggaatgtcaaggagttaccagagaggttatgtagtgcccttgatttttattttacctacaagtctacaaattctaaaatttactcaattgatttaacttttttaataaacagcaccagtcttggcccattggatacaattaaaaatttggaccttctcagttcttagtttcacaggtttatttatggaaaaacactggcggtgctcntgtggcggtcacatcgtntttacgggaggggggaaaaacgntttgtttcaaaac

SEQ ID NO: 1065 - DNA, 459 bp, Artificial Sequence
  Description of Artificial sequences:primer
  misc_feature (1)..(459): 5' terminal sequence from clone image:43760. protein phosphatase 2 (formerly 2a), catalytic subunit, alpha isoform(PPP2CA) gene.
  misc_feature (426)..(426): n is a, c, g, or t
  misc_feature (445)..(445): n is a, c, g, or t
ttttacagatctttttgactatcttcctctcactgccttggtggatgggcagatcttctgtctacatggtggtctctcgccatctatagatacactggatcatatcagagcacttgatcgcctacaagaagttccccatgagggtccaatgtgtgacttgctgtggtcagatccagatgaccgtggtggttggggtatatctcctcgaggagctggttacacctttgggcaagatatttctgagacatttaatcatgccaatggcctcacgttggtgtctagagctcaccagctagtgatggagggatataactggtgccatgaccggaatgtagtaacgattttcagtgctccaaactattgttatcgttgtggtaaccaagctgcaatcatgggaacttgacgatactctaaaatactctttcntgcagttttgacccagcanctcgtagggccgag

SEQ ID NO: 1066 - DNA, 2181 bp, Artificial Sequence
  Description of Artificial sequences:primer
  misc_feature (1)..(2181): protein phosphatase 2 (formerly 2a), catalytic subunit, alpha isoform(PPP2CA) gene.
agagagccgagctctggagcctcagcgagcggaggaggaggcgcagggccgacggccgagtactgcggtgagagccagcgggccagcgccagcctcaacagccgccagaagtacacgaggaaccggcggcggcgtgtgcgtgtaggcccgtgtgcgggcggcggcgcgggaggagcgcggagcggcagccggctggggcgggtggcatcatggacgagaaggtgttcaccaaggagctggaccagtggatcgagcagctgaacgagtgcaagcagctgtccgagtcccaggtcaagagcctctgcgagaaggctaaagaaatcctgacaaaagaatccaacgtgcaagaggttcgatgtccagttactgtctgtggagatgtgcatgggcaatttcatgatctcatggaactgtttagaattggtggcaaatcaccagatacaaattacttgtttatgggagattatgttgacagaggatattattcagttgaaacagttacactgcttgtagctcttaaggttcgttaccgtgaacgcatcaccattcttcgagggaatcatgagagcagacagatcacacaagtttatggtttctatgatgaatgtttaagaaaatatggaaatgcaaatgtttggaaatattttacagatctttttgactatcttcctctcactgccttggtggatgggcagatcttctgtctacatggtggtctctcgccatctatagatacactggatcatatcagagcacttgatcgcctacaagaagttccccatgagggtccaatgtgtgacttgctgtggtcagatccagatgaccgtggtggttggggtatatctcctcgaggagctggttacacctttgggcaagatatttctgagacatttaatcatgccaatggcctcacgttggtgtctagagctcaccagctagtgatggagggatataactggtgccatgaccggaatgtagtaacgattttcagtgctccaaactattgttatcgttgtggtaaccaagctgcaatcatggaacttgacgatactctaaaatactctttcttgcagtttgacccagcacctcgtagaggcgagccacatgttactcgtcgtaccccagactacttcctgtaatgaaattttaaacttgtacagtattgccatgaaccatatatcgacctaatggaaatgggaagagcaacagtaactccaaagtgtcagaaaatagttaacattcaaaaaacttgttttcacatggaccaaaagatgtgccatataaaaatacaaagcctcttgtcatcaacagccgtgaccactttagaatgaaccagttcattgcatgctgaagcgacattgttggtcaagaaaccagtttctggcatagcgctatttgtagttacttttgctttctctgagagactgcagataataagatgtaaacattaacacctcgtgaatacaatttaacttccatttagctatagctttactcagcatgactgtagataaggatagcagcaaacaatcattggagcttaatgaacatttttaaaaataattaccaaggcctcccttctacttgtgagttttgaaattgttctttttattttcagggataccgtttaatttaattatatgatttgtctgcactcagtttattccctactcaaatctcagccccatgttgttctttgttattgtcagaacctggtgagttgttttgaacagaactgttttttccccttcctgtaagacgatgtgactgcacaagagcactgcagtgtttttcataataaacttgtgaactaagaactgagaaggtcaaattttaattgtatcaatgggcaagactggtgctgtttattaaaaaagttaaatcaattgagtaaattttagaatttgtagacttgtaggtaaaataaaaatcaagggcactacataacctctctggtaactccttgacattcttcagattaacttcaggatttatttgtatttcacatattacaatttgtcacattgttggtgtgcactttgtgggttcttcctgcatattaacttgtttgtaagaaaggaaatctgtgctgcttcagtaagacttaattgtaaaaccatataacttgagatttaagtctttgggttgtgttttaataaaacagcatgttttcaggtagag

SEQ ID NO: 1067 - DNA, 455 bp, Artificial Sequence
  Description of Artificial sequences:primer
  misc_feature (1)..(455): 3' terminal sequence from clone image:43941. casein kinase 2, alpha 1 polypeptide(CSNK2A1) gene.
  misc_feature (118)..(118): n is a, c, g, or t
  misc_feature (142)..(142): n is a, c, g, or t
  misc_feature (147)..(147): n is a, c, g, or t
  misc_feature (254)..(254): n is a, c, g, or t
  misc_feature (312)..(312): n is a, c, g, or t
tttttttttttgataaataaaaccaaacgtttatttacaccaaagaattcaacactggatctttcacatatgaaggacaaagtattatatatatacacacagcaaggggttgcggggntgtaacaagagagtttatagtttnccacnaattaccaggtctcccatttcagcttcaatggagatagtggctctgctcctacctctcaagatacatttacaagactgaggagcaggtcttctcacttgatggcatntgagggaaggggacggtcggaggaaaagaaggtgaaagcttaaaatgggaagtcagtntggccacatctcccattagctctagcatgaaacctgtacagacaatgtttgtttcttttgtaaaagcagtaagttatgcccgtaactaaatgattcaaatggccagacaaggaaactaggaagttttgcctccctctcctacc

SEQ ID NO: 1068 - DNA, 417 bp, Artificial Sequence
  Description of Artificial sequences:primer
  misc_feature (1)..(417): 5' terminal sequence from clone image:43941. casein kinase 2, alpha 1 polypeptide(CSNK2A1) gene.
  misc_feature (134)..(134): n is a, c, g, or t
  misc_feature (136)..(136): n is a, c, g, or t
  misc_feature (139)..(140): n is a, c, g, or t
  misc_feature (192)..(192): n is a, c, g, or t
  misc_feature (357)..(357): n is a, c, g, or t
  misc_feature (366)..(366): n is a, c, g, or t
cggcttactgcaagagaggcaatggagcacccctatttctacactgttgtgaaggaccaggctcgaatgggttcatctagcatgccagggggcagtacgcccgtcagcagcgccaatatgatgtcagggatttntnagnnccaaccccttcaccccttggacctcttgcaggctcaccagtgattgctgctnccaacccccttgggatgcctgttccagctgccgctgcgctcagcagtaacggccctatctgtctcctgatgcctgagcagaggtcggggagtccaccctctccttgatgcagcttgcgcctggcggggaggggtgaaacacttcagaagcaccgtgtctgaaccnttgcttgtngatttatagtagttcagtcataaaaaaaaaattataatagggctgaatttc

SEQ ID NO: 1069 - DNA, 2440 bp, Artificial Sequence
  Description of Artificial sequences:primer
  misc_feature (1)..(2440): casein kinase 2, alpha 1 polypeptide(CSNK2A1) gene.
cccgcctcctggtaggagggggtttccgcttccggcagcagcggctgcagcctcgctctggtccctgcggctggcggccgagccgtgtgtctcctcctccatcgccgccatattgtctgtgtgagcagaggggagagcggccgccgccgctgccgcttccaccacagctctatcaaggcttgtcaagcagtgtgctcatcacatggtaaatcatgcagcgtggaacctcataaaatctccaagaaacatcattcacccatactgactagtttcacatctctttgtttgaagaaaacaggtctgaaacaaggtcttacccccagctgcttctgaacacagtgactgccagatctccaaacatcaagtccagctttgtccgccaacctgtctgacatgtcgggacccgtgccaagcagggccagagtttacacagatgttaatacacacagacctcgagaatactgggattacgagtcacatgtggtggaatggggaaatcaagatgactaccagctggttcgaaaattaggccgaggtaaatacagtgaagtatttgaagccatcaacatcacaaataatgaaaaagttgttgttaaaattctcaagccagtaaaaaagaagaaaattaagcgtgaaataaagattttggagaatttgagaggaggtcccaacatcatcacactggcagacattgtaaaagaccctgtgtcacgaacccccgccttggtttttgaacacgtaaacaacacagacttcaagcaattgtaccagacgttaacagactatgatattcgattttacatgtatgagattctgaaggccctggattattgtcacagcatgggaattatgcacagagatgtcaagccccataatgtcatgattgatcatgagcacagaaagctacgactaatagactggggtttggctgagttttatcatcctggccaagaatataatgtccgagttgcttcccgatacttcaaaggtcctgagctacttgtagactatcagatgtacgattatagtttggatatgtggagtttgggttgtatgctggcaagtatgatctttcggaaggagccatttttccatggacatgacaattatgatcagttggtgaggatagccaaggttctggggacagaagatttatatgactatattgacaaatacaacattgaattagatccacgtttcaatgatatcttgggcagacactctcgaaagcgatgggaacgctttgtccacagtgaaaatcagcaccttgtcagccctgaggccttggatttcctggacaaactgctgcgatatgaccaccagtcacggcttactgcaagagaggcaatggagcacccctatttctacactgttgtgaaggaccaggctcgaatgggttcatctagcatgccagggggcagtacgcccgtcagcagcgccaatatgatgtcagggatttcttcagtgccaaccccttcaccccttggacctctggcaggctcaccagtgattgctgctgccaacccccttgggatgcctgttccagctgccgctggcgctcagcagtaacggccctatctgtctcctgatgcctgagcagaggtgggggagtccaccctctccttgatgcagcttgcgcctggcggggaggggtgaaacacttcagaagcaccgtgtctgaaccgttgcttgtggatttatagtagttcagtcataaaaaaaaaattataataggctgattttcttttttctttttttttttaactcgaacttttcataactcaggggattccctgaaaaattacctgcaggtggaatatttcatggacaaatttttttttctcccctcccaaatttagttcctcatcacaaaagaacaaagataaaccagcctcaatcccggctgctgcatttaggtggagacttcttcccattcccaccattgttcctccaccgtcccacactttagggggttggtatctcgtgctcttctccagagattacaaaaatgtagcttctcaggggaggcaggaagaaaggaaggaaggaaagaaggaagggaggacccaatctataggagcagtggactgcttgctggtcgcttacatcactttactccataagcgcttcagtggggttatcctagtggctcttgtggaagtgtgtcttagttacatcaagatgttgaaaatctacccaaaatgcagacagatactaaaaacttctgttcagtaagaatcatgtcttactgatctaaccctaaatccaactcatttatacttttatttttagttcagtttaaaatgttgataccttccctcccaggctccttaccttggtcttttccctgttcatctcccaacatgctgtgctccatagctggtaggagagggaaggcaaaatctttcttagttttctttgtcttggccattttgaattc

SEQ ID NO: 1070 - DNA, 410 bp, Artificial Sequence
  Description of Artificial sequences:primer
  misc_feature (1)..(410): 3' terminal sequence from clone image:44152. chaperonin containing tcp1, subunit 3 (gamma)(CCT3) gene.
  misc_feature (11)..(11): n is a, c, g, or t
  misc_feature (75)..(75): n is a, c, g, or t
  misc_feature (172)..(172): n is a, c, g, or t
  misc_feature (248)..(248): n is a, c, g, or t
  misc_feature (325)..(325): n is a, c, g, or t
  misc_feature (352)..(352): n is a, c, g, or t
  misc_feature (363)..(363): n is a, c, g, or t
  misc_feature (385)..(385): n is a, c, g, or t
  misc_feature (395)..(395): n is a, c, g, or t
ttttttttttntttcaaatgacttagatttaatcatcggaagcaaactaaatgaaaaccttacaatagagaaganttacatgtcagtgtcttttggaaaactgagctgggacagaaagggactgggggctgccccccaacctgatcccttctgaacaaagacgtccacagtnttcctgggcactctggctcagggaaaaggggagactctgctggttctgtgcattgaagtagccttgcctagcactnactcctgggccagcatcaggagccccgccttgccggctctgggtcatcgcctttctttttgtgggcctgaaacgatntcatcaattcgcagtaggcaggaactnccgttttccanttgctgtctttattaagtttgncagttttcanagccaatgggttccc

SEQ ID NO: 1071 - DNA, 410 bp, Artificial Sequence
  Description of Artificial sequences:primer
  misc_feature (1)..(410): 5' terminal sequence from clone image:44152. chaperonin containing tcp1, subunit 3 (gamma)(CCT3) gene.
  misc_feature (377)..(377): n is a, c, g, or t
  misc_feature (386)..(386): n is a, c, g, or t
  misc_feature (395)..(395): n is a, c, g, or t
gaatggtcggaaagagattgacataaaaaaatatgcaagagtggaaaagatacctggaggcatcattgaagactcctgtgtcttgcgtggagtcatgattaacaaggatgtgacccatccacgtatgcggcgctatatcaagaaccctcgcattgtgctgctggattcttctctggaatacaagaaaggagaaagccagactgacattgagattacacgagaggaggacttcacccgaattctccagatggaggaagagtacatccagcagctctgtgaggacattatccaactgaagcccgatgtggtcatcactgaaaagggcatctcagatttagctcagcactaccttatgcgggccaatatcacagccattncgcagagtnccggaaggncaggccattattcgg

SEQ ID NO: 1072 - DNA, 1965 bp, Artificial Sequence
  Description of Artificial sequences:primer
  misc_feature (1)..(1965): chaperonin containing tcp1, subunit 3 (gamma)(CCT3) gene.
gtctggttctctctctccagaaggttctgccggttcccccagctctgggtacccggctctgcatcgcgtcgccatgatgggccatcgtccagtgctcgtgctcagccagaacacaaagcgtgaatccggaagaaaagttcaatctggaaacatcaatgctgccaagactattgcagatatcatccgaacatgtttgggacccaagtccatgatgaagatgcttttggacccaatgggaggcattgtgatgaccaatgatggcaatgccattcttcgagagattcaagtccagcatccagcggccaagtccatgatcgaaattagccggacccaggatgaagaggttggagatgggaccacatcagtaattattcttgcaggggaaatgctgtctgtagctgagcacttcctggagcagcagatgcacccaacagtggtgatcagtgcttaccgcaaggcattggatgatatgatcagcaccctaaagaaaataagtatcccagtcgacatcagtgacagtgatatgatgctgaacatcatcaacagctctattactaccaaagccatcagtcggtggtcatctttggcttgcaacattgccctggatgctgtcaagatggtacagtttgaggagaatggtcggaaagagattgacataaaaaaatatgcaagagtggaaaagatacctggaggcatcattgaagactcctgtgtcttgcgtggagtcatgattaacaaggatgtgacccatccacgtatgcggcgctatatcaagaaccctcgcattgtgctgctggattcttctctggaatacaagaaaggagaaagccagactgacattgagattacacgagaggaggacttcacccgaattctccagatggaggaagagtacatccagcagctctgtgaggacattatccaactgaagcccgatgtggtcatcactgaaaagggcatctcagatttagctcagcactaccttatgcgggccaatatcacagccatccgcagagtccggaagacagacaataatcgcattgctagagcctgtggggcccggatagtcagccgaccagaggaactgagagaagatgatgttggaacaggagcaggcctgttggaaatcaagaaaattggagatgaatactttactttcatcactgactgcaaagaccccaaggcctgcaccattctcctccggggggctagcaaagagattctctcggaagtagaacgcaacctccaggatgccatgcaagtgtgtcgcaatgttctcctggaccctcagctggtgccagggggtggggcctccgagatggctgtggcccatgccttgacagaaaaatccaaggccatgactggtgtggaacaatggccatacagggctgttgcccaggccctagaggtcattcctcgtaccctgatccagaactgtggggccagcaccatccgtctacttacctcccttcgggccaagcacacccaggagaactgtgagacctggggtgtaaatggtgagacgggtactttggtggacatgaaggaactgggcatatgggagccattggctgtgaagctgcagacttataagacagcagtggagacggcagttctgctactgcgaattgatgacatcgtttcaggccacaaaaagaaaggcgatgaccagagccggcaaggcggggctcctgatgctggccaggagtgagtgctaggcaaggctacttcaatgcacagaaccagcagagtctccccttttcctgagccagagtgccaggaacactgtggacgtctttgttcagaagggatcaggttggggggcagcccccagtccctttctgtcccagctcagttttccaaaagacactgacatgtaattcttctctattgtaaggtttccatttagtttgcttccgatgattaaatctaagtcatttgaaaaaaaaaaaaaaaaaaaaaaaa

SEQ ID NO: 1073 - DNA, 416 bp, Artificial Sequence
  Description of Artificial sequences:primer
  misc_feature (1)..(416): 3' terminal sequence from clone image:45021. hypothetical protein loc115286(LOC115286) gene.
tttttttttttcagcattaccaaacttatttattaagaggttctgaggaaattgttcagagtaccgccacagaccccgttttcttctcttagctctctggcatacaggccaatgacttcataccagccagcctataccacggatggcacaatctccatgccggtatcttagcacaactggtcttcagcactggggcctatagttcagacagctgctcagcgggaagagggtttgcactgcaggcccctctcttgacagaagtggaggtgaggcttgtctctgcttcaaggactctttctgccaacttccaacagcaagctgtgcgtttcgggtcataaggcccccagaaagatggaaacctccccagacttgatgggctggccatttcggaggggaaggacacctggcaaattaat

SEQ ID NO: 1074 - DNA, 492 bp, Artificial Sequence
  Description of Artificial sequences:primer
  misc_feature (1)..(492): 5' terminal sequence from clone image:45021. hypothetical protein loc115286(LOC115286) gene.
  misc_feature (13)..(13): n is a, c, g, or t
  misc_feature (375)..(375): n is a, c, g, or t
  misc_feature (402)..(402): n is a, c, g, or t
  misc_feature (435)..(435): n is a, c, g, or t
  misc_feature (444)..(444): n is a, c, g, or t
  misc_feature (462)..(462): n is a, c, g, or t
cagcgcgcgaggnacgtgatccgcttctgctccggcttggattgtagccttgacgaggtctgagcgaccatggaccggccggggttcgtggcagcgctggtggctggtggggtagcaggtgtttctgttgacttgatattatttcctctggataccattaaaaccaggctgcagagtccccaaggatttagtaaggctggtggttttcatggaatatatgctggcgttccttctgctgctattggatcctttcctaatgctgctgcattttttatcacctatgaatatgtgaagtggtttttgcatgctgattcatcttcatatttgacacctatgaaacatatgttgggctgcctctgctgggagaagtggttncctgcctggatttcggagttccatctngaagtgggttaaggcagaggggcacaggtatcnggctttctnacaaggaacatttcaganttttctcttaacatctttatatggaagggg

SEQ ID NO: 1075 - DNA, 1873 bp, Artificial Sequence
  Description of Artificial sequences:primer
  misc_feature (1)..(1873): hypothetical protein loc115286(LOC115286) gene.
cgcccagcgcgcgaggacgtgatccgcttctgctccggcttggattgtagccttgacgaggtctgagcgaccatggaccggccggggttcgtggcagcgctggtgctgctgcattttttatcacctatgaatatgtgaagtggtttttgcatgctgattcatcttcatatttgacacctatgaaacatatgttggctgcctctgctggagaagtggttgcctgcctgattcgagttccatctgaagtggttaagcagagggcacaggtatctgcttctacaagaacatttcagattttctctaacatcttatatgaagagggtatccaagggttgtatcgaggctataaaagcacagttttaagagagattcctttttctttggtccagtttcccttatgggagtccttaaaagccctctggtcctggaggcaggatcatgtggtggattcttggcagtcagcagtctgtggagcttttgcaggtggatttgccgctgcagtcaccacccctctagacgtggcaaagacaagaattacgctggcaaaggctggctccagcactgctgatgggaatgtgctctctgtcctgcatggggtctggcggtcacaggggctggcaggattatttgcaggtgtcttccctcgaatggcagccatcagtctgggaggtttcatctttctgggggcttatgaccgaacgcacagcttgctgttggaagttggcagaaagagtccttgaagcagagacaagcctcacctccacttctgtcaagagaggggcctgcagtgcaaaccctcttccgctgagcagctgtctgaactataggccccagtgctgaagaccagttgtgctaagataccggcatggagattgtgccatccgtggtataggctggctggtatgaagtcattggcctgtatgccagagagctaagagaagaaaacggggtctgtggcggtactctgaacaatttcctcagaacctcttaataaataagtttggtaatgctgaggccaggccttttagagctttcatttgatctgtatctgatctttcatttcctgccacctgatggtggattcagcagaaggcaagatggttataattctaaaagaatagcttgtttgtttgtttgggaaaaggagacttggggaagagttgtgtatgtgggtgtttctccccctagttaattcctgttgtgtaagggtaggctttgttgaaaaagaaagaaagattgaactacaggtgcatagcaagcactctttctgggtaactaggctgctggttttaattaccctcagatttcacccataaaaacgcacaattgtattattttacagagatgtgtccagcgccccctgtggtgtgtgagagaaagcagctagaactcaagtgactaggtgggcccagctggcttcgtgcaggagggcacggtgggtgagccattctcgccattctcatgtcagactgaaaggagggcctgggccagctttgaaaaggcaggatgaaatggaaaggtcaccacacttagggattttagaccttgactaacaagctccaggtgtagaaaaattcaaaacaaaatgtcaggaatctagcagtgttgtctgccctggagcaaacaaacagtatgtgattttgcttcgcctattttttttttcttttttgggggaagataattaaaggcagaatgactgcgtttgtaaaagaaggaccaccaactatactgacatttataaatgaacctttattaaagacacttcaatgccatttgttagacacttcaatattttacatggttttcaatgtacactgtaccaaaatttctataaataaataactttgtacataaaagtaaaaaaaaaaaaaaa

SEQ ID NO: 1076 - DNA, 353 bp, Artificial Sequence
  Description of Artificial sequences:primer
  misc_feature (1)..(353): 3' terminal sequence from clone image:45086. synuclein, alpha (non a4 component of amyloid precursor)(SNCA) gene.
  misc_feature (11)..(11): n is a, c, g, or t
  misc_feature (173)..(173): n is a, c, g, or t
  misc_feature (284)..(284): n is a, c, g, or t
  misc_feature (294)..(294): n is a, c, g, or t
  misc_feature (325)..(325): n is a, c, g, or t
  misc_feature (333)..(333): n is a, c, g, or t
ttttttttttncttttttttgcaatgcagataacgttttattttaattctcaccatttatatacaaacacaagtgaataaaacacatcgcaaaatggtaaaatttcatatttagtatttataggtgcatagtttcatgctcacatatttttaagtattatatatattaacaantttcacaatacgtcattattcttagacagtatcattaaaaggacacctaaaaatcttataatatatggatagcaaatcactaacaacttctgaacaacagcaacaaaaaantagtgagggntttaggaaataagtgggtggtcacttagggngttttttnaatttgttttttaaccatcg

SEQ ID NO: 1077 - DNA, 417 bp, Artificial Sequence
  Description of Artificial sequences:primer
  misc_feature (1)..(417): 5' terminal sequence from clone image:45086. synuclein, alpha (non a4 component of amyloid precursor)(SNCA) gene.
  misc_feature (365)..(365): n is a, c, g, or t
  misc_feature (395)..(395): n is a, c, g, or t
ctcctctggggacagtcccccccgggtgccgcctccgcccttcctgtgcgctccttttccttcttctttcctattaaatattatttgggaattgtttaaattttttttttaaaaaaagagagaggcggggaggagtcggagttgtggagaagcagagggactcagtgtggtgtaaaggaattcattagccatggatgtattcatgaaaggactttcaaaggccaaggagggagttgtggctgctgctgagaaaaccaaacagggtgtggcagaagcagcaggaaagacaaaagagggtgttctctatgtaggctccaaaaccaagggagggagtgggtgcatgggtgtgggcaacagtgggcttnaggaagacccaaaggaggcaagttgacaantgtttgggagggagcagttggt

SEQ ID NO: 1078 - DNA, 1543 bp, Artificial Sequence
  Description of Artificial sequences:primer
  misc_feature (1)..(1543): synuclein, alpha (non a4 component of amyloid precursor)(SNCA) gene.
ggagtggccattcgacgacagtgtggtgtaaaggaattcattagccatggatgtattcatgaaaggactttcaaaggccaaggagggagttgtggctgctgctgagaaaaccaaacagggtgtggcagaagcagcaggaaagacaaaagagggtgttctctatgtaggctccaaaaccaaggagggagtggtgcatggtgtggcaacagtggctgagaagaccaaagagcaagtgacaaatgttggaggagcagtggtgacgggtgtgacagcagtagcccagaagacagtggagggagcagggagcattgcagcagccactggctttgtcaaaaaggaccagttgggcaagaatgaagaaggagccccacaggaaggaattctggaagatatgcctgtggatcctgacaatgaggcttatgaaatgccttctgaggaagggtatcaagactacgaacctgaagcctaagaaatatctttgctcccagtttcttgagatctgctgacagatgttccatcctgtacaagtgctcagttccaatgtgcccagtcatgacatttctcaaagtttttacagtgtatctcgaagtcttccatcagcagtgattgaagtatctgtacctgcccccactcagcatttcggtgcttccctttcactgaagtgaatacatggtagcagggtctttgtgtgctgtggattttgtggcttcaatctacgatgttaaaacaaattaaaaacacctaagtgactaccacttatttctaaatcctcactatttttttgttgctgttgttcagaagttgttagtgatttgctatcatatattataagatttttaggtgtcttttaatgatactgtctaagaataatgacgtattgtgaaatttgttaatatatataatacttaaaaatatgtgagcatgaaactatgcacctataaatactaaatatgaaattttaccattttgcgatgtgttttattcacttgtgtttgtatataaatggtgagaattaaaataaaacgttatctcattgcaaaaatattttatttttatcccatctcactttaataataaaaatcatgcttataagcaacatgaattaagaactgacacaaaggacaaaaatataaagttattaatagccatttgaagaaggaggaattttagaagaggtagagaaaatggaacattaaccctacactcggaattccctgaagcaacactgccagaagtgtgttttggtatgcactggttccttaagtggctgtgattaattattgaaagtggggtgttgaagaccccaactactattgtagagtggtctatttctcccttcaatcctgtcaatgtttgctttatgtattttggggaactgttgtttgatgtgtatgtgtttataattgttatacatttttaattgagccttttattaacatatattgttatttttgtctcgaaataattttttagttaaaatctattttgtctgatattggtgtgaatgctgtacctttctgacaataaataatattcgaccatg

SEQ ID NO: 1079 - DNA, 263 bp, Artificial Sequence
  Description of Artificial sequences:primer
  misc_feature (1)..(263): 3' terminal sequence from clone image:45706. mortality factor 4 like 2(MORF4L2) gene.
  misc_feature (10)..(10): n is a, c, g, or t
  misc_feature (38)..(38): n is a, c, g, or t
  misc_feature (199)..(199): n is a, c, g, or t
  misc_feature (258)..(258): n is a, c, g, or t
tttttttttnaaatttagaaacaaattttatttaaganctgaaatacaattcctaaaatatcaacttttccagaaaaccgtggctacacaataatgcattgcctctatcatgttagaacgtgcattagactcaaatacaaaaaccatgaaacaaatcaccatccttcaacaatttgagcaaagatagcaatgcctaagnaacaacataggatgggacttgtcagaggatggggctgttttacttgcaagccaccatanaaaaa

SEQ ID NO: 1080 - DNA, 1826 bp, Artificial Sequence
  Description of Artificial sequences:primer
  misc_feature (1)..(1826): mortality factor 4 like 2(MORF4L2) gene.
cacgtcggctgctgggaagatctggattctcgtttcaggtcaccatcagaaaagctaagtttgctgtatagtgaggatcaggagatctgatcctgattgcagaaccttccctgattacagaatcttggatgatttcacaaaagttcatcttcattgcagatacctgcctttctttctaggttgtatctcccacttcacccttctagaccatcccagaagatctataagatttcatctgggaaatcactaggagttcttggaagggaaagaaggaagattgttggttggaataaaaacagggttgaatgagttccagaaagcagggttctcaacctcgtggacagcaatctgcagaagaagagaacttcaaaaaaccaactagaagcaacatgcagagaagtaaaatgagaggggcctcctcaggaaagaagacagctggtccacagcagaaaaatcttgaaccagctctcccaggaagatggggtggtcgctctgcagagaaccccccttcaggatccgtgaggaagaccagaaagaacaagcagaagactcctggaaacggagatggtggcagtaccagcgaagcacctcagccccctcggaagaaaagggcccgggcagaccccactgttgaaagtgaggaggcgtttaagaatagaatggaggttaaagtgaagattcctgaagaattaaaaccatggcttgttgaggactgggacttagttaccaggcagaagcagctgtttcaactccctgccaagaaaaatgtagatgcaattctggaggagtatgcaaattgcaagaaatcgcagggaaatgttgataataaggaatatgcggttaatgaagttgtggcaggaataaaagaatatttcaatgtgatgttgggcactcagctgctctacaaatttgagaggccccagtatgctgaaatcctcttggctcaccctgatgctccaatgtcccaggtttatggagcaccacacctactgagattatttgtaagaattggagcaatgttggcctatacgccccttgatgagaaaagccttgcattattgttgggctatttgcatgatttcctaaaatatctggcaaagaattctgcatctctctttactgccagtgattacaaagtggcttctgctgagtaccaccgcaaagccctgtgagcgtctacagacagctcaccatttttgtcctgtatctgtaaacactttttgttcttagtctttttcttgtaaaattgatgttctttaaaatcgttaatgtataacagggcttatgtttcagtttgttttccgttctgttttaaacagaaaataaaaggagtgtaagctccttttctcatttcaaagttgctaccagtgtatgcagtaattagaacaaagaagaaacattcagtagaacattttattgcctagttgacaacattgcttgaatgctggtggttcctatccctttgacactacacaattttctaatatgtgttaatgctatgtgacaaaacgccctgattcctagtgccaaaggttcaacttaatgtatatacctgaaaacccatgcatttgtgctctttttttttttatggtgcttgaagtaaaacagcccatcctctgcaagtccatctatgttgttcttaggcattctatctttgctcaaattgttgaaggatggtgatttgtttcatggtttttgtatttgagtctaatgcacgttctaacatgatagaggcaatgcattattgtgtagccacggttttctggaaaagttgatattttaggaattgtatttcagatcttaaataaaatttgtttctaaatttc

SEQ ID NO: 1081 - DNA, 465 bp, Artificial Sequence
  Description of Artificial sequences:primer
  misc_feature (1)..(465): 3' terminal sequence from clone image:45831. tyrosine 3-monooxygenase/tryptophan 5-monooxygenase activation protein, beta polypeptide(YWHAB) gene.
  misc_feature (414)..(414): n is a, c, g, or t
  misc_feature (424)..(424): n is a, c, g, or t
  misc_feature (445)..(445): n is a, c, g, or t
  misc_feature (462)..(462): n is a, c, g, or t
tttttttttgttttcttttttggagatgaggtctcgctatgttgcccaggctggagtgcagttattcacaggtgcaaccacagggcactgcagctttaaactcctgggctcaagcgatcctcctgcctcagcctcccaaatagttgggactagatgcacgcaccaccacgcctgactcaggacattattcttaaaggtattatccaggaaacagataaggtcattcataaaacacacggctttttttctttagctcagtgttaacaatgaaagtagattccactattgaagcacaagttgcaaattggtaacatagtgaacatattgctgtagggaaagggggttcagtgtggtgtgttatatgagcacttgaacttttcaaggtgtcataagccagttatctgccacaaaggntttccctttncaggattcgagtttccccagnggaagacactgtggacnttt

SEQ ID NO: 1082 - DNA, 378 bp, Artificial Sequence
  Description of Artificial sequences:primer
  misc_feature (1)..(378): 5' terminal sequence from clone image:45831. tyrosine 3-monooxygenase/tryptophan 5-monooxygenase activation protein, beta polypeptide(YWHAB) gene.
  misc_feature (257)..(257): n is a, c, g, or t
  misc_feature (274)..(274): n is a, c, g, or t
gaactcccagcaggcttaccaggaagcatttgaaattagtaagaaagaaatgcagcctacacacccaattcgtcttggtctggcactaaatttctcagtcttttactatgagattctaaactctcctgaaaaggcctgtagcctggcaaaaacggcatttgatgaagcaattgctgaattggatacgctgaatgaagagtcttataaagacagcactctgatcatgcagttacttagggacaatctcactctgtggnacatcggaaaaccaggngagacgaaggagacgctggggagggagagaactaatgtttctcgtgctttgtgatctgttcagtgtcactctgtaccctcaacatatatcccttgtggcgatta

SEQ ID NO: 1083 - DNA, 3110 bp, Artificial Sequence
  Description of Artificial sequences:primer
  misc_feature (1)..(3110): tyrosine 3-monooxygenase/tryptophan 5-monooxygenase activation protein, beta polypeptide(YWHAB) gene.
gcggaagtggagctaccgccaccgccgccgccgattccggagccggggtagtcgccgccgccgccgccgctgcagccactgcaggcaccgctgccgccgcctgagtagtgggcttaggaaggaagaggtcatctcgctcggagcttcgctcggaagggtctttgttccctgcagccctcccacggcagagtctccagagatttgggccgctacaaaaagtgcattttgcccattcggctgtggatagagaagcaggaagagcactggacttggagtcagggaatgacaatggataaaagtgagctggtacagaaagccaaactcgctgagcaggctgagcgatatgatgatatggctgcagccatgaaggcagtcacagaacaggggcatgaactctccaacgaagagagaaatctgctctctgttgcctacaagaatgtggtaggcgcccgccgctcttcctggcgtgtcatctccagcattgagcagaaaacagagaggaatgagaagaagcagcagatgggcaaagagtaccgtgagaagatagaggcagaactgcaggacatctgcaatgatgttctggagctgttggacaaatatcttattcccaatgctacacaaccagaaagtaaggtgttctacttgaaaatgaaaggagattattttaggtatctttctgaagtggcatctggagacaacaaacaaaccactgtgtcgaactcccagcaggcttaccaggaagcatttgaaattagtaagaaagaaatgcagcctacacacccaattcgtcttggtctggcactaaatttctcagtcttttactatgagattctaaactctcctgaaaaggcctgtagcctggcaaaaacggcatttgatgaagcaattgctgaattggatacgctgaatgaagagtcttataaagacagcactctgatcatgcagttacttagggacaatctcactctgtggacatcggaaaaccagggagacgaaggagacgctggggagggagagaactaatgtttctcgtgctttgtgatctgttcagtgtcactctgtaccctcaacatatatcccttgtgcgataaaaaaaaaaaaaaaaaaaaaaagagaatcgtacgtcgactttcgatttttcacagcctcagcctaggaaaaatggttcatgggataaacagctggtatttgtatctaaaactcagattggtcacataaatgccacggcattccgaagttttgattttgattaacattgacaggattactgtgtgtttaattttttaaaaactgaacactgtgattatggggttttgtaatttagcagaactcttactggtagaaaaaatagacctgaattatgtgtaactttttggaaggtttaatctgatatcaaaataatcattgaaatacaattccattgtaaagttgtacagaaagttatagagattatattgtgatgctggaacttggagtgagacacacatcatttggcatttgagttgaatggtaattcacagtaatgctgccgttgttcgggacttaaagacacttgacctgtttgggctgttgccacttaaaagttcatgaccacaaatgtccacagtgtcttcctctgaggaaactcgaatcctgaaatggaaattctttgtggcagataactggcttatgacaccttgaaaagttcaagtgctcatataacacaccacactgaaccccctttcctacagcaatatgttcactatgttaccaatttgcaacttgtgcttcaatagtggaatctactttcattgttaacactgagctaaagaaaaaaagccgtgtgttttatgaatgaccttatctgtttcctggataatacctttaagaataatgtcctgagtcaggcgtggtggtgcgtgcatctagtcccaactatttgggaggctgaggcaggaggatcgcttgagcccaggagtttaaagctgcagtgccctgtggttgcacctgtgaataactgcactccagcctgggcaacatagcgagacctcatctccaaaaaagaaaacaaaaaacaaaaaaaggaatgatgttctgtagagatggcctttcacttgaggagtactcagttttcaggttcttcctagctcggggcttttaaattttgaaatctaaacattctttcccaccatcctttttgactgttgaccttggttttctcttctaagtttctgtccctctgcttccttactttttttcctttttgaattctatctttatctgtcttttgttcactttttaatgctatatatgggcaggggtgagagacattactgagcaccttggtgagcaagcctggctttaaagattggagaagagcttctggcaccagaaccctgtcttcctccagttctcaacacggtgttgctcttcagtcataccggaatctgaatcaaaaaagtatttttaaatatccatgatttctccctgtattgaggctagccctgatcatgctttttgtgcctgtcaccaggtctcccaagtgcactcatccaggtcagtgctcagatgtgtttaaggagaccctatattcagggaagttgcgtgaacactgcagtggggagaattgagaatagtcaggcctatcagtctcacagaatcacccctctacctttgatattccacttagctgtagagtccatctgtttgtccatctgctgaaatgagaaaagaaaaatttatgcactgatttaaaacaaaccaaaaaaaaagaaaaaaacaaaaaaaaaaatccctcctttctagctgaacaaaaatgtgcagttaatacttggcgcttgaaaatgcagtagtgaatgtggaaccaagcctgtctgtatatctggtagctcttttcttgctttgttttttcttaccagtattctgcctaacgtttgcttctgtgatggttatattgcctagcaagcacacccgtggttgtgaaaatagtatagcaaaaaagaaaaatccccggttattgatgtactagatttgtgtatgtcttttaaacagttctagtttcaccttacacagaataatcaggaaaagtgtaaaaattcaaaagtgaaataaaaattttatcagttaaaaaa

SEQ ID NO: 1084 - DNA, 407 bp, Artificial Sequence
  Description of Artificial sequences:primer
  misc_feature (1)..(407): 3' terminal sequence from clone image:45900. proprotein convertase subtilisin/kexin type 7(PCSK7) gene.
  misc_feature (168)..(168): n is a, c, g, or t
  misc_feature (177)..(177): n is a, c, g, or t
  misc_feature (196)..(196): n is a, c, g, or t
  misc_feature (374)..(374): n is a, c, g, or t
ttttttttttgtttggaaggtttttattttggaaaagctgtgcagtaaaaaaattcaagaaaatgttgctgtgaaaagagaaaaacaaatcttaagcattaaaaaaaattcaaccaactaactcagaagaggggagaaggccaaggttgagagaagagtcacagcctntcaggcagnatagctggcctccgcgggnaaggccatttccctgagcacttgcagaggaagacagggtggtggcaggactggagtggcagtggctcccaaggctctctcctccaacatgtgcatctgccatctgctctgcaatcctgccgcaggattccctagtgaaggcagctcaggcctggggggagccgtgtgtatcccagctntgccggcagcatcataaccaattcgtggggggt

SEQ ID NO: 1085 - DNA, 3497 bp, Artificial Sequence
  Description of Artificial sequences:primer
  misc_feature (1)..(3497): proprotein convertase subtilisin/kexin type 7(PCSK7) gene.
cactgctcctccggctcccgggaagccgcgagtttccgcagggaggcggcggcagctgcggcggggccggtctgtagcctttgctgagtcaacactactcacagtgaaagtgatgccttttctccatttgcacaacatgagtgtgacgtggttagccagaccaggagctcaacctcatgtagaatccagtccactgctctgatgccgaaggggaggcagaaagtgccacacttggatgcccccctgggcctgcccacctgcctctggctggaattagccgggctcttcttactggttccctgggtcatgggcctggcagggacaggtgggcctgatggccagggcacaggggggccgagctgggctgtgcacctggaaagcctggaaggtgacggggaggaagagactctggagcagcaggcggatgccttggcccaggcagcagggctggtgaatgctggacgcatcggagagcttcaggggcactacctctttgtccagcctgctgggcacaggccggccctggaggtggaggccatccggcagcaggtggaggctgtgttggctgggcatgaagctgtgcgctggcactcagagcagaggctgctaaggcgggccaagcgcagcgtccacttcaacgaccccaagtacccgcagcaatggcacctgaataaccgacggagcccgggcagggacatcaacgtgacgggtgtgtgggaacgcaatgtgactgggcgaggggtgacggtggtggtagtggatgacggagtggaacacaccatccaggacattgcacccaactatagccctgagggtagctatgacctcaactctaatgaccctgaccccatgccccacccggatgtggagaatggcaaccaccatggcacgcgatgtgcaggagagatcgcggctgtgcccaacaacagcttctgtgccgtgggcgtggcctacgggagccgcatcgcaggtatccgggtactggatggacctctcacagacagcatggaggcagtggcgttcaacaagcactatcagatcaatgacatctacagctgcagctggggaccagatgacgatgggaagacagtggatggcccccatcagcttggaaaggctgccttacaacatggggtgattgctggtcgccagggctttgggagcatctttgtggtagccagtggcaacggaggccaacacaacgacaactgcaactacgatggctacgccaactccatctacaccgtcaccataggagctgtggatgaggagggacgcatgcctttctatgcagaagaatgtgcctccatgctggcagtcaccttcagtggtggggacaagatgcttcggagcattgtgaccactgactgggaccttcagaagggcactggctgcactgagggccacacagggacctcagctgcagcgcctctggcagctggcatgatagccttaatgctgcaggtgcggccctgcctcacgtggcgtgacgtccagcacatcattgtcttcacagccacccggtatgaggatcgccgtgcagagtgggtcaccaacgaggcaggcttcagccatagccaccagcacggtttcggcctcctcaacgcctggaggctcgtgaatgcagccaagatctggacatctgtcccttacttagcatcctacgtcagtcccgtgttaaaagaaaacaaggcgattccgcagtccccccgttccctggaggtcctgtggaatgtcagcaggatggacctggagatgtcagggctgaagaccctggagcatgtggcagtgacagtctccatcactcacccacggcgcggcagcttggagctgaagctgttctgccccagtggcatgatgtccctcatcggcgccccccgcagcatggactcggatcccaacggcttcaatgactggaccttctccactgtgcgatgctggggggagagagcccgagggacctacaggcttgtcatcagggatgtcggggatgagtcattccaggtcggcatcctccggcaatggcagctgaccctatatggctctgtgtggagtgcagtagacatcagggacagacaaaggctgttagagagtgccatgagtggaaaatacctgcacgatgacttcgccctgccctgcccaccggggctgaaaattcctgaggaagatggttacaccatcacccccaacaccctcaagaccctggtgctggtaggctgtttcaccgtcttctggactgtttactacatgctggaagtatatttgagccagaggaatgtggcttccaatcaagtttgtaggagtggaccctgccactggccccatcggagccggaaagccaaggaggaagggacagagctagaatcagtgccactttgcagcagcaaggatccagacgaagtggaaacagagagcaggggccctcccaccacctctgacctccttgccccagacctgctggagcaaggggactggagcctgtcccagaacaagagcgccctggactgccctcatcagcacctagacgtaccgcacgggaaggaggagcagatctgctgacctcagggcctgacagtgtgggacaggctcttctttcccaaaattagggagctcttgacagaaagcagttctgatgcttacatctggaatctgaggcatcctctgactccactcaaagagggtgagggccttcttaagatacaaatggtggaggattgctgccagagaagtctggtcagagccacagggtctgcctccagccaaacgggagcttttggtgagaaggtgttggacaggggattggcgcccccctttggtttggcctccatcctcatctctcttgggccaagccagctgcctaggtcccccaagcatgggggaccccttcccacatataagttgagaaggtgcctgccatagccaggagcgcatctcaatggaaacatcactggggtcacttgggaagaggacttcggggtagaggctgggaggagcccctggacatgcctgtcctgaaagcggctgcctccattatccattcccaagatgcctgatcagaaaccaaccatgaatgaacccctggctccttcaccacccccacgattggtatgatgctgccggcacagctgggatacacacggctcccccaggcctgagctgcttcactagggaatcctgcggcaggactgcagagcagatggcagatgcacatgttggaggagagagccttgggagccactgccactccagtcctgccaccaccctgtcttcctctgcaagtgctcagggaaatggccttcccgccggaggccagctatctgcctgacaggctgtgactcttctctcaaccttggccttctcccctcttctgagctagttggttgaattttttttaatgcttaagatttgtttttctcttttcacagcaacattttcttgaatttttttctgcacagcttttccaaaataaaaaccttccaaacaaaaaaaaaaaaaaa

SEQ ID NO: 1086 - DNA, 427 bp, Artificial Sequence
  Description of Artificial sequences:primer
  misc_feature (1)..(427): 3' terminal sequence from clone image:46147. cytochrome c oxidase subunit viia polypeptide 2 like(COX7A2L) gene.
  misc_feature (169)..(169): n is a, c, g, or t
  misc_feature (260)..(260): n is a, c, g, or t
  misc_feature (280)..(280): n is a, c, g, or t
  misc_feature (370)..(370): n is a, c, g, or t
  misc_feature (397)..(397): n is a, c, g, or t
  misc_feature (421)..(421): n is a, c, g, or t
tttttttttttttcattcatgtatttattccacagtcaaaataaatcaaaatttaaagctataacatttttaaaagataaaggagaatttgtggcacagctgcattaacaaaacagacaccagtctaaagtgcaacactaaacaggtattctctgttcccacggtggantaattacacataagatttcactaaagataggagatgaggcaaataaccctttgaaattacctgcccaacaaatagaggcaggctacattantttaacattttactgcaaantggaaaaaatccccgaggtgactaactcaaactcctcatttcatgcacatgaccttgggcttctgtgttctttccatagccacatccaantccagaaaggctcctgcaccccatggnttcaaaatggcaacctcaagtccncgaggt

SEQ ID NO: 1087 - DNA, 494 bp, Artificial Sequence
  Description of Artificial sequences:primer
  misc_feature (1)..(494): 5' terminal sequence from clone image:46147. cytochrome c oxidase subunit viia polypeptide 2 like(COX7A2L) gene.
  misc_feature (35)..(35): n is a, c, g, or t
  misc_feature (37)..(37): n is a, c, g, or t
  misc_feature (397)..(397): n is a, c, g, or t
  misc_feature (412)..(412): n is a, c, g, or t
  misc_feature (423)..(423): n is a, c, g, or t
  misc_feature (434)..(434): n is a, c, g, or t
  misc_feature (453)..(453): n is a, c, g, or t
  misc_feature (464)..(464): n is a, c, g, or t
  misc_feature (489)..(489): n is a, c, g, or t
tccttctctggggcggtcggttggcagcggatggngnaagccggactctgggcgtcatgtactacaagtttagtggcttcacgcagaagttggcaggagcatgggcttcggaggcctatagcccgcagatttaaagcctgtggtttccacagaagcaccacctatcatatttgccacaccaactaaactgacctccgattccacagtgtatgattatgctgggaaaaacaaagttccagagctacaaaagtttttccagaaagctgatggtgtgcccgtctacctgaaacgaggcctgcctgaccaaatgctttaccgggaccaccatgggcgctgactgtggggaggggaccattttacttgcctggatccgccctcttacatgggctttcgcagncccaaaaacaaatgnagttagggttncagaaggattnggtttgtttttttggcatnaaaccttttgnaagttcccttttcattgttaaattnaaatt

SEQ ID NO: 1088 - DNA, 458 bp, Artificial Sequence
  Description of Artificial sequences:primer
  misc_feature (1)..(458): 3' terminal sequence from clone image:46518. dystrobrevin, alpha(DTNA) gene.
  misc_feature (202)..(202): n is a, c, g, or t
  misc_feature (210)..(210): n is a, c, g, or t
  misc_feature (351)..(351): n is a, c, g, or t
  misc_feature (409)..(409): n is a, c, g, or t
  misc_feature (416)..(416): n is a, c, g, or t
  misc_feature (423)..(423): n is a, c, g, or t
  misc_feature (452)..(452): n is a, c, g, or t
ttttttttttttttatttttttttgtaatacattatctttattgtctgacattacagattgattttacactttccttttttacagaccatgggaatgaagggtaaaaatgtgtccagcattttccaaacattctttgttacacacaaacacacataatgaataatagaaaagagcatacagaagaaatgaaagatacgttgnaaattggnacaggttgtggttctaattgatccatgggaaataatgtgaaacttttaaataatgctagtgagtggggatatattgtcatacatagcgtgggtacatggcacttggaaattaaaggctgcttttattttggcttctatttnaatttaatttaatttaatttaatttgttttttttttgagtttggcggctccccctggngggcttntgagccnggaccacgggttcagacagctcccgtttnggcctt

SEQ ID NO: 1089 - DNA, 440 bp, Artificial Sequence
  Description of Artificial sequences:primer
  misc_feature (1)..(440): 5' terminal sequence from clone image:46518. dystrobrevin, alpha(DTNA) gene.
  misc_feature (361)..(361): n is a, c, g, or t
  misc_feature (417)..(417): n is a, c, g, or t
taaccagcatgaacgacaccctgttctcccactctgttccctcctcaggaagtccttttattaccagggagcatgcttgagagttcaaaccggcttgatgaagaacacaggctaattgccaggtatgcggcaaggctggcagcagagtcctcttcgtctcagccacctcagcagagaagtgctcctgacatctctttcaccatcgatgcgaataagcagcaaaggcagctgattgctgagctagaaaacaagaacagagaaatcttacaggagatccagagacttcggctagagcatgaacaagcttctcagcccacgccagaggaaggcacagcaaaaccccaccctggctgggcagaantccggctccttcaggacagcgcaaaggtggagttgggaacagaggattttttgttntccaggggagagcccggagagag

SEQ ID NO: 1090 - DNA, 3145 bp, Artificial Sequence
  Description of Artificial sequences:primer
  misc_feature (1)..(3145): dystrobrevin, alpha(DTNA) gene.
gattgctgtgtgttgagcacaaggggaagaatgaacacagctttttattgaagttaaaggttactttggagttgtttggaaatgtgtaaggtcaaatactatagttttcagcatatgtagtacttcagaggaagaattaaggggcatgttggtgcatttaactacaaaaccaggtggcaggttgctgctctctccttcagaaccccgctctgaggaaagctaaggaagagaacaggacgtctgagtgtgtgactgagaatgattgaagatagtgggaaaagaggaaataccatggcagaaagaagacagctgtttgcagagatgagggctcaagatctggatcgcatccgactctccacctacagaacagcatgcaagcttaggtttgttcacaagaaatgcaatttgcacctggtggacatatggaatgtcatagaagcattgcgggaaaatgctctgaacaacctggacccaaacactgaactcaacgtgtcccgcttagaggctgtgctctccactattttttaccagctcaacaaacggatgccaaccactcaccaaatccatgtggagcagtccatcagcctcctccttaacttcctgcttgcagcgtttgatccggaaggccatggtaaaatttcagtatttgctgtcaaaatggctttagccacattgtgtggagggaagatcatggacaaattaagatatattttctcaatgatttctgactccagtggggtgatggtttatggacgatatgaccaattccttcgggaagttctcaaactacccacggaagttttggagggtccttcatttggttacacagaacagtcagccagatcctgtttctcccaacagaaaaaagtcacgttaaatggtttcttggacacgcttatgtcagatcctcccccgcagtgtctggtctggttgcctcttctgcatcgactagcaaatgtggaaaatgtcttccatccggttgagtgttcctactgccacagtgagagtatgatgggatttcgctaccgatgccaacagtgtcacaattaccagctctgtcaggactgcttctggaggggacatgccggtggttctcatagcaaccagcaccaaatgaaagagtacacgtcatggaaatcacctgctaagaagctgactaatgcattaagcaagtccctgagctgtgcttccagccgtgaacctttgcaccccatgttcccagatcagcctgagaagccactcaacttggctcacatcgttgatacttggcctcccagacctgtaaccagcatgaacgacaccctgttctcccactctgttccctcctcaggaagtccttttattaccaggagctctcctcccaaggacagtgaagtagagcagaacaaactgctggctagggctgctccagcttttctgaagggcaaagggatacagtacagcctgaatgtggcagacaggctagctgatgaacatgttctcatcgggttgtatgtcaacatgctccggaacaacccctcatgcatgcttgagagttcaaaccggcttgatgaagaacacaggctaattgccaggtatgcggcaaggctggcagcagagtcctcttcgtctcagccacctcagcagagaagtgctcctgacatctctttcaccatcgatgcgaataagcagcaaaggcagctgattgctgagctagaaaacaagaacagagaaatcttacaggagatccagagacttcggctagagcatgaacaagcttctcagcccacgccagagaaggcacagcaaaaccccaccctgctggcagaactccggctcctcagacagcgcaaagatgagctggaacagagaatgtctgctctccaggagagccggagagagctaatggtccagttggagggtctcatgaagctactaaaggaagaagaactgaagcagggagtaagttatgtcccctactgcaggtcttaactaacagtggaggggcctgccgacctgcggttttctcattgcttttgctctaatgtatgttcatgcttcagtttggaaagagaaaaaagtcatactaatttgcttctttttcaatgtagtgcttgaattgagatatataaatttagcattttttataactatcactactattcgcatcaaaagaagaactatgacatcttttagaaaagggaacgaattgtcatttattggaaacattttagatccccagaggtataagtttcaaaccagtcttagcttttcaagttgttgatcagacccttctcttaatagagagataccacagtcactagagataccctgaggttcatgtcatcccaaaacccacagcactcagaagctaacctctacacccactcacactgtgagtattcagttcggtttcattttactgaaaacctgtgaaacctctttttataaaaatcaggcaattaaatcccttttcatcacacaattattgagccttgttccccatggctcaccaaaatgtgctcaatactgtgagagaaagactgtactccataactgactattcacgtcccatctttttggctcttccccaaagcagaatccttactgttggttgacagtaatctctttttaaaaagtaactctcagctttttccttagcaccagagctttcggctccgggagacgagagggtcattacatacttttttttttttctggaaataggggcattgtgactttatagcctaaactggagctgtctgaacctgtggtcaggctcaagagccagcagggggagcagcaaactcaaaaaaaaaacaaattaaattaaattaaattaaattaaatagaagcaaaataaaagcagctttaatttcaagtgcatgtaccacgctatgtatgacaatatatcccactcactagcattatttaaaagtttcacattatttccatggatcaattagaaccacaacctgtccaatttcaacgtatctttcatttcttctgtatgctcttttctattattcattatgtgtgtttgtgtgtaacaaagaatgtttggaaaatgctggacacatttttacccttcattcccatggtctgtaaaaaaggaaagtgtaaaatcaatctgtaatgtcagacaataaagataatgtattacatc

SEQ ID NO: 1091 - DNA, 478 bp, Artificial Sequence
  Description of Artificial sequences:primer
  misc_feature (1)..(478): 3' terminal sequence from clone image:46888. protein phosphatase 1, regulatory subunit 7(PPP1R7) gene.
  misc_feature (53)..(53): n is a, c, g, or t
  misc_feature (99)..(99): n is a, c, g, or t
  misc_feature (129)..(129): n is a, c, g, or t
  misc_feature (164)..(164): n is a, c, g, or t
  misc_feature (196)..(196): n is a, c, g, or t
  misc_feature (218)..(218): n is a, c, g, or t
  misc_feature (270)..(270): n is a, c, g, or t
  misc_feature (283)..(283): n is a, c, g, or t
  misc_feature (292)..(292): n is a, c, g, or t
  misc_feature (314)..(314): n is a, c, g, or t
  misc_feature (330)..(330): n is a, c, g, or t
  misc_feature (347)..(347): n is a, c, g, or t
  misc_feature (358)..(358): n is a, c, g, or t
  misc_feature (365)..(365): n is a, c, g, or t
  misc_feature (403)..(403): n is a, c, g, or t
  misc_feature (431)..(431): n is a, c, g, or t
  misc_feature (441)..(441): n is a, c, g, or t
ttttttttttgtctgtcaatgtacattttatattaaaaaagccaaaataacantggggtgagaacaggaggccactataccagtggccaagagttcagntccttggaggccgtctttggagaggctcantgggactcgtattctggcagcagcacagcaccgtntgggacacaggacaccctccccacacctgagntttcacccacaggcaagggatntgggcgagaactgacgggcacacgtgaaaacagtcagccctgcccggcgttntttgaaggagagntctaagggnacacaagcacacagggttgagntcagcttttacccagnttttttaacttacctantttttaaaaanttgaaantgggctggggttaaaagactaaaaaacctcggtttttngcagggtcaagtttgcctggaaccctgncacaccgggntttaggggccagctagggccagtcccccgttttgtct

SEQ ID NO: 1092 - DNA, 368 bp, Artificial Sequence
  Description of Artificial sequences:primer
  misc_feature (1)..(368): 5' terminal sequence from clone image:46888. protein phosphatase 1, regulatory subunit 7(PPP1R7) gene.
  misc_feature (49)..(49): n is a, c, g, or t
  misc_feature (111)..(111): n is a, c, g, or t
  misc_feature (160)..(160): n is a, c, g, or t
  misc_feature (239)..(239): n is a, c, g, or t
  misc_feature (350)..(350): n is a, c, g, or t
agagtgcaagagttctggatgaacgacaatctccttgagagctggagcngcctcgacgagctgaagggagccaggagcctggagacagtgtacctggagcggaaccccttncagaaggacccccagtaccggcggaaggtcatgctcgccctcccctccntgcggcagatcgatgccacgttcgtcaggttctgagtccttcttggctcctcatgtggtccctctcctcggaagaactncccagccatgggtttttaacccacctgttgctcctgaggtcgtcagtatatcaacagtcacaaacccaatgggcaataaaggcactgacgatagctgggcgcgcgcgacgncacacaccatttttcaga

SEQ ID NO: 1093 - DNA, 1299 bp, Artificial Sequence
  Description of Artificial sequences:primer
  misc_feature (1)..(1299): protein phosphatase 1, regulatory subunit 7(PPP1R7) gene.
gaattggcagccaacatggcggcggaacgcggcgcggggcagcaacagtcgcaggagatgatggaggttgacaggcgggtcgagtctgaagaatccggcgatgaagaagggaagaaacacagcagtggcatcgtggccgacctcagtgaacagagcctgaaggatggggaggagcggggggaggaggacccagaagaagaacatgagctgcctgtggacatggaaaccatcaacctggacagagatgcagaggatgttgatttgaatcactatcgcatagggaagattgaaggatttgaggtactgaagaaagtgaagactctctgcctccgccaaaatttaattaaatgcattgagaatctggaggagctacagagtcttcgagagctggatctttacgacaaccagatcaagaagattgagaatctggaggcgctaacagagctggagattctagatatttcttttaatctgctgagaaacatcgaaggggttgacaagttgacacgactgaaaaaactcttcttggtcaacaataaaatcagtaaaattgagaacttaagcaacttacatcaactacagatgctagagctgggatctaaccgcatccgggcaatcgaaaatatcgacaccttaaccaacctggagagtttgtttttggggaaaaacaaaattactaaacttcagaacctggatgcgctcaccaacctgacagtcctcagtatgcagagcaaccggctgaccaagatcgagggtctgcagaacctggtgaacctgcgggagctgtaccttagccacaatggcatcgaggtcatcgagggcctggagaacaataacaaactcacgatgttggacattgcatcaaatagaatcaaaaagattgaaaatatcagccatctaacagagctgcaagagttctggatgaacgacaatctccttgagagctggagcgacctcgacgagctgaagggagccaggagcctggagacagtgtacctggagcggaaccccttgcagaaggacccccagtaccggcggaaggtcatgctcgccctcccctccgtgcggcagatcgatgccacgttcgtcaggttctgagtccttcttggctcctcatgtggtccctctcctcggaagaactgcccagccacgggtttttaacccacctgttgctcctgaggtcgtcactatatcaacagtcacaaacccaatggcaataaaggcactgacgatagctggcgcgcgcgacgccacacaccattttcagatgccgttgcaattaaatcttgccacactgtc

SEQ ID NO: 1094 - DNA, 478 bp, Artificial Sequence
  Description of Artificial sequences:primer
  misc_feature (1)..(478): 3' terminal sequence from clone image:470122. potassium large conductance calcium-activated channel, subfamily m, beta member 1(KCNMB1) gene.
  misc_feature (140)..(140): n is a, c, g, or t
  misc_feature (166)..(166): n is a, c, g, or t
  misc_feature (370)..(370): n is a, c, g, or t
gattgttgtttggcatacatttattaatattggaattaaaaatatatatggcactttatatcctagaaaatagtaatactgtaaatgtgttctagaaatgggagctgctgttgctcttattagagaattcaaacaaagangggaggctcgctggggacagcttctnggggaggatgggtaccgctttgagacaacagggagaactcaggcacagaggtgacgatcatcgttctctgtggggcacatagtgatgcagccggaaacaggtatgagtcagttgagtggggacaggtaatagagagctagaactggctggccttatggctcccaaggcattggggagccactgtacattcttgagcaggcaatngacttcacaaaaggatttctcaaaggttagtcctggcaacagaagacagcgtggattggactggaagagtgggagggcaggtggagaaggcattgtgctgcaagtggg

SEQ ID NO: 1095 - DNA, 546 bp, Artificial Sequence
  Description of Artificial sequences:primer
  misc_feature (1)..(546): 5' terminal sequence from clone image:470122. potassium large conductance calcium-activated channel, subfamily m, beta member 1(KCNMB1) gene.
  misc_feature (60)..(60): n is a, c, g, or t
  misc_feature (227)..(227): n is a, c, g, or t
  misc_feature (339)..(339): n is a, c, g, or t
  misc_feature (399)..(399): n is a, c, g, or t
  misc_feature (481)..(481): n is a, c, g, or t
  misc_feature (521)..(521): n is a, c, g, or t
  misc_feature (528)..(528): n is a, c, g, or t
  misc_feature (533)..(533): n is a, c, g, or t
  misc_feature (545)..(545): n is a, c, g, or t
gccatccatccatgccataccacttgtcagggcacaggggactggctgggccccagggtngctccccacttgcagcacaatgccttctccacctgccctcccactcttccagtccaatccacgctgtcttctgttgcaggactaacctttgagaaatccttttgtgaagtcattgcctgctcaagaatgtacagtggctccccaatgccttggaggccataaggcangccagttctagctctctattacctgtccccactcaactgactcatacctgtttccggctgcatcactatgtgccccacagagaacgatgatcgtcacctctgtgcctgagtnatccctgttgtctcaaagcggtacccatcctcccccagaagctgtccccagcgagcctcncttctttgtttgaattctctaataagagcaacagcagctcccatttctagaacacatttacagtattactatttgtctaggntataaagtgcatatatatttttaattccaatattaaatanatgtatngcaancaacaatcaaant

SEQ ID NO: 1096 - DNA, 1518 bp, Artificial Sequence
  Description of Artificial sequences:primer
  misc_feature (1)..(1518): potassium large conductance calcium-activated channel, subfamily m, beta member 1(KCNMB1) gene.
cagagagaagaagaaatatttccaaatataccaggctgatctttcgtagtttctcagtcttgctgtctgttgttgtttgaaatctgtttcccacgagactctgggaagatggaggtgcagggcttgggtaacagctgccttcctcagggctgggtacctgctctccgagtctgtgtctccaggctgtgtgctcagacttgaccatgtttgggcatggaggcttgccccagatggggaccaaaagctgcttccctggagacgggcggggaggccaaacttcctgctgaagctctgtggcctcttttggggtgggggcgggggtccaggcagaaagaaactgtctgctgctcaagacccacaggacgccgggaagactaaatgatcactgcccccagtgaatatggtgaagaagctggtgatggcccagaagcggggagagacacgagccctttgcctgggtgtaaccatggtggtgtgtgccgtcatcacctactacatcctggtcacgactgtgctgcccctctaccagaaaagcgtgtggacccaggaatccaagtgccacctgattgagaccaacatcagggaccaggaggagctgaagggcaagaaggtgccccagtacccatgcctgtgggtcaacgtgtcagctgccggcaggtgggctgtgctgtaccacacggaggacactcgggaccagaaccagcagtgctcctacatcccaggcagcgtggacaattaccagacggcccgggccgacgtggagaaggtcagagccaaattccaagagcagcaggtcttctactgcttctccgcacctcgggggaacgaaaccagcgtcctattccagcgcctctacgggccccaggccctcctcttctccctcttctggcccaccttcctgctgaccggtggcctcctcattatcgccatggtgaagagcaaccagtacctgtccatcctggcggcccagaagtagagccatccatccatgccataccacttgtcagggcacaggggactggctgggcccccagggctgctccccacttgcagcacaatgccttctccacctgccctcccactcttccagtccaatccacgctgtcttctgttgcaggactaacctttgagaaatccttttgtgaagtcattgcctgctcaagaatgtacagtggctccccaatgccttggaggccataaggccagccagttctagctctctattacctgtccccactcaactgactcatacctgtttccggctgcatcactatgtgccccacagagaacgatgatcgtcacctctgtgcctgagttctccctgttgtctcaaagcggtacccatcctcccccagaagctgtccccagcgagcctcccttctttgtttgaattctctaataagagcaacagcagctcccatttctagaacacatttacagtattactattttctaggatataaagtgccatatatatttttaattccaatattaataaatgtatgccaaacaacaata

SEQ ID NO: 1097 - DNA, 463 bp, Artificial Sequence
  Description of Artificial sequences:primer
  misc_feature (1)..(463): 3' terminal sequence from clone image:470175. mature t-cell proliferation 1(MTCP1) gene.
  misc_feature (331)..(331): n is a, c, g, or t
  misc_feature (411)..(411): n is a, c, g, or t
  misc_feature (423)..(423): n is a, c, g, or t
  misc_feature (449)..(449): n is a, c, g, or t
ttttttttttttttttttctcttaaacaggtttattttagcagctcagtatattacattctacatatttgtcttttaatgtgtttatatttctgcctgttctgcatagatggcatattcattaacttttgtagctgactttttcatttgctatttgctgctacctggcctgaagagtcaggaggataaaaaaaattcatttggtggaaacatggagcagcacttcagaagaactttactttgatgcagacttccgtgttaggttttcttcctcttctttttcaaatcctgaacagacgacagatcttcccttgggataacttgagcacaanacttacgcagttcttgggatgacagcctggacactttgattccatggtagctgttggcttgtaaacatttctgggatatnaaaggcttgctnctggcacggatccttctgcggcatanccagaaaaaggaaa

SEQ ID NO: 1098 - DNA, 517 bp, Artificial Sequence
  Description of Artificial sequences:primer
  misc_feature (1)..(517): 5' terminal sequence from clone image:470175. mature t-cell proliferation 1(MTCP1) gene.
  misc_feature (244)..(244): n is a, c, g, or t
tccaagtcacagcccccgaatctcgtacaactctccctggaccacttccggttgccgcccgcgcctcataacttcggttcgagtgacctcggcccgggatgcccctcggctcaccccgggctcacgtcgcgatcctggcttgagtggcccagggtgggagacctggaagttttagcctagctgttctcaaggcggattaattagcccaagaaacattatattcatttttctggatatgccgcanaaggatccgtgccagaagcaagcctgtgagatacagaaatgtttacaagccaacaagctacatggaatcaaagtgtcaggctgtcatccaagaactgcgtaagtgttgtgctcagtatcccaagggaagatctggtcgtctgttcaggatttgaaaaagaagaggaagaaaacctaacacggaagtctgcatcaaagtaaagttcttctgaagtgctgctccatgtttccaccaaatgaattttttttatcctcctgactcttcaggcaggta

SEQ ID NO: 1099 - DNA, 1847 bp, Artificial Sequence
  Description of Artificial sequences:primer
  misc_feature (1)..(1847): mature t-cell proliferation 1(MTCP1) gene.
gggaaacgcccgcgcggtttggggcaggcgtggccgtcggggcggagggcggtggccggccgcggtccgggcgtcaggccgggcggcgggggcggcagggaggcggcgctctggggccgcaggcggacgtactctgtgagcggcgcccgggcgcctgggcaggcgcctcccgagtaccggcgcccattttgcccgcccgctaaggagacccgtgcgcggcctacacgcttgggggacagccctttaagacgacatctccgcgaacgccggcctcttgagccagggggacgctcttttgaaagtcagtcccaaaacagttaaggttttattttattttgttttatttccaagtcacagcccccgaatctcgtacaactctccctggaccacttccggttgccggcccgcgcctcataacttcggttcgagtgacctcggcccgggatgcccctcggctcaccccgggctcacgtcgcgatcctggcttgagtggcccagggtgggagacctggaagttttagcctagctgttctcaaggcggattaattagcccaagaaacattatattcatgcttaggtggagaaaagcagggctagaattggaacccaaagcccagaatggcaggagaggatgtgggggctccacccgatcacctctgggttcaccaagagggtatctaccgcgacgaataccagcgcacgtgggtggccgtcgtggaagaggagacgagtttcctaagggcacgagtccagcaaattcaggttcccttaggtgacgcagctaggccaagtcaccttcttacctcccagctacctctcatgtggcaactctacccggaggagcgctacatggataacaactctcgcttgtggcagatacagcatcatttaatggtcaggggagtacaggagctgttgcttaagcttttgcctgatgactaacctggtgctgggattctacgaagatatgctcctttgttctgttcagtatttggcaatcacttcatccactactgcagtgcacccacccttgggcctggggggagggagtgggttgaaaaactgctcaagaaacagaagtttagcaagggtcatgaagaatactgcaagtgaaactgcagagagaggttacgtaggcagaaagcaagtcaacaaaagcacttagtcaggatccgtaacttgaaattgactcctttggaaattgccatagaacccttaatggacatcatcggctggacctgggatctgatgaatcccacaaaagtcagcaccttctacagaacagatgccctgatcaccaaggacttggtactgatttagagagaagagagcagctcctagcagcatcaacatctatttgtcgcttatttgccctgcagcaattcacctgcctttccttctcccatcctttttctggatatgccgcagaaggatccgtgccagaagcaagcctgtgagatacagaaatgtttacaagccaacagctacatggaatcaaagtgtcaggctgtcatccaagaactgcgtaagtgttgtgctcagtatcccaagggaagatctgtcgtctgttcaggatttgaaaaagaagaggaagaaaacctaacacggaagtctgcatcaaagtaaagttcttctgaagtgctgctccatgtttccaccaaatgaattttttttatcctcctgactcttcaggccaggtagcagcaaatagcaaatgaaaaagtcagctacaaaagttaatgaatatgccatctatgcagaacaggcagaaatataaacacattaaaagacaaatatgtagaatgtaatatactgagctgctaaaataaacctgtttaagagaaaaa

SEQ ID NO: 1100 - DNA, 225 bp, Artificial Sequence
  Description of Artificial sequences:primer
  misc_feature (1)..(225): 3' terminal sequence from clone image:470279. contactin associated protein 1(CNTNAP1) gene.
  misc_feature (189)..(189): n is a, c, g, or t
  misc_feature (217)..(217): n is a, c, g, or t
tttgccaattgagcttttcttttatatataaacaaataatttaaaaattcgaataatatatagagtttctctagagagacactttgcaacaaaaaatatatataaagaatatgacctcctgggtaaatgaagcagcatctctgagcggaggaaagagggttcctcatgcactggagggggcgaactttngggcaggcacaaaggccattgcatatcnttgggaaa

SEQ ID NO: 1101 - DNA, 5293 bp, Artificial Sequence
  Description of Artificial sequences:primer
  misc_feature (1)..(5293): contactin associated protein 1(CNTNAP1) gene.
caagagcggaggaccaggaaccagagagagagagagagaaaagagagaggagagacagagcgcttgggggcgaaaggagagagggagggaagggtgggtaaggaggagagagcggtctgctgcaaaccccaggaggagagcttggagcccaagccagaactcgagccctagccggagccgttcacagggaggcggctgccgggaccgtcagccctgcatgatgcatctccggctcttctgcatcctgctcgccgcggtctcaggagccgagggctggggctactacggctgcgacgaggagctggtgggtcccctgtatgcacgctccctgggcgcctcctcctactacagtctccttactgcgccgcgattcgccaggctgcacggcataagcgggtggtcaccacggattggggatccgaatccctggctccagatagacttaatgaagaagcaccggatccgggccgtggccacacagggctcctttaattcttgggactgggtcacacgttacatgctactctacggcgaccgagtggacagctggacaccgttctaccagcgagggcacaactcgaccttctttggtaacgtgaacgagtcggcggtggtgcgccatgacctgcacttccacttcactgcgcgctacatccgcatcgtgcccctggcctggaacccacgcggcaagatcggcctgaggctcggcctctatggctgcccatacaaggccgacatactctatttcgacggcgacgatgccatctcctaccgcttcccgcgaggggtcagccgaagcctgtgggacgtgttcgccttcagcttcaagaccgaggagaaggacggtcttctgctgcacgccgagggcgcccagggcgactacgtgacgctcgagctggagggggcacacctgctgctgcacatgagcctgggcagcagccctatccagccaagaccaggtcacaccaccgtgagcgcaggcggagtcctcaatgaccagcactggcactatgtgcgggtggaccgatttggccgcgatgtaaatttcaccctggacggctatgtgcagcgctttattctcaatggagacttcgagaggctgaacctggacactgagatgttcatcggaggtctggtgggcgccgcgcggaagaacctggcctatcggcataacttccgcggctgcatagaaaacgtaatcttcaaccgcgtcaacatcgcagacctggccgtgcggcgccattcccggatcaccttcgagggtaaggtggcttttcgttgcctggacccggtaccgcaccctatcaacttcggaggccctcacaacttcgttcaagtgcccggtttcccacgccgtggccgcctggcagtctcatttcgcttccgcacctgggacctcaccgggcttctccttttctcccgtctgggggacgggctgggccacgtggagctgacgctcagcgaagggcaggtcaacgtgtccatcgcgcagagcggccgaaagaagcttcagttcgctgctgggtaccgactgaatgacggcttttggcacgaggtgaattttgtggcacaggaaaaccatgcagttatcagcattgatgatgtggaaggggcagaggtcagggtctcatacccgttgctgatccggacagggacctcatatttctttgggggttgtcccaagccagccagtcgatgggactgccactccaaccagacggcattccatggctgcatggagctgctcaaggtggatggtcaactggtcaacctgactctggtggagggccggcggcttggattctatgctgaggtcctctttgatacatgtggcatcactgataggtgcagccctaacatgtgtgagcatgatggacgctgctaccagtcttgggatgacttcatttgctactgcgaactgacgggctacaagggagagacctgccacacacctttgtataaggaatcctgtgaggcttatcggctcagtgggaaaacttctggaaacttcaccattgatcctgatggcagtggccccctgaagccatttgtagtgtactgtgatatccgagagaaccgagcgtggacagttgtgcggcatgacaggctgtggacaactcgagtgacaggttccagcatggagcggccattcctgggggctatccagtactggaatgcatcctgggaggaagtcagtgcccttgccaatgcttcccagcattgtgaacagtggatcgagttctcctgctacaattcccggctgctcaacactgcaggaggctacccctacagcttttggattggccgaaatgaggagcagcacttctactggggaggctcccagcctgggatccagcgctgtgcctgtggtctggaccggagctgtgtggaccctgccttgtactgcaactgtgacgctgaccagccccagtggagaactgacaagggactgctgacctttgtggaccatctgcctgtcactcaggtagtgataggggatacgaaccgctccacttctgaggcccagttcttcctgaggcctctgcgctgctatggcgatcgaaattcctggaacaccatttccttccacaccggggctgcactacgcttccccccaatccgtgccaaccacagcctggatgtctccttctacttcaggacctctgctccctcgggggtcttcctagagaatatggggggcccttactgccagtggcgccgaccttatgtgcgggtggaactcaacacatcccgggatgtggtcttcgcctttgatgtggggaatggggatgagaacctcacagtacactcagacgactttgagttcaatgatgacgagtggcacctggtccgggctgaaatcaacgtgaagcaggcccggctccgagtggatcaccggccctgggttctgcggcctatgccactgcagacctacatctggatggagtatgaccagcccctctatgtgggatctgcagagcttaagagacgcccctttgtgggttgcttgagggccatgcgtctgaacggagtgactctgaacctggagggccgtgccaatgcctctgagggtacctcacccaactgcacaggccactgtgcccaccctcggctcccctgtttccatggaggccgctgcgtggagcgctatagctactacacgtgtgactgtgacctcacggcttttgatgggccatactgcaaccacgatattggtggtttctttgagccgggcacctggatgcgctataacctacagtcagcgctgcgctctgcagccagggagttctcccacatgctgagccggccagtgccaggctatgagcctggctacatcccgggctatgatactccgggctatgtgcctggctaccatggccccgggtaccgcctgcccgactacccccggcctggtcggcctgtgcccggttaccgtgggcctgtctacaacgttacgggagaggaggtctccttcagcttcagcaccagctccgcccctgctgtcctgctctacgtcagttcctttgttcgtgactacatggctgtgctcatcaaggatgatgggacccttcagctgcgatatcagctgggcaccagtccctacgtgtaccagctaaccactcgaccagtgaccgatggccagccccatagcatcaatatcacccgtgtttaccggaacctcttcatccaggtggactacttcccactgacagagcagaagttctcgctgttggtggacagccagttggactcacccaaggccttgtatttagggcgtgtgatggagacaggagtcattgacccggagatccagcgctacaacaccccaggtttctcaggctgcctgtctggtgttcgattcaacaacgtggctcccctcaagacccacttccgaacccctcgacccatgactgctgagctagctgaggcccttcgagttcagggagaactgtccgaatctaattgcggagctatgccacgtcttgtttcagaggtgccacctgagcttgatccctggtatctgcccccagacttcccctactaccatgatgaaggatgggttgccatacttttaggctttttggtggcctttctgctgctggggctggtgggaatgttggtgctcttctatctgcaaaatcatcgctataagggctcctaccataccaatgagcccaaggctgcccacgagtaccatcctggcagcaaacctcccctacccacttcaggccctgcccaggtccccacccctacagcagctcccaaccaagctccagcctcagccccagccccagccccaactccagccccagcccctggcccccgggatcagaacctaccccagatcctggaggagtccaggtctgaatgagtcagaagggcttctgggaccaattccagctcctgacattcccccagtcctgcctctcccccatcctatcagggacatttggctcctcttagctggctctgctcatccagaggatattcccccatcccccccccatcaagtttggtgggcagagctacagatgggacccaagggagtggccgagcctcactgcctaaaccaatgcccttctcatccctgtttccccaggctcctggctgtttatctgccccaaaggagaagcctcatggggttgacataggtcctttctgccatctctgttccagctgctgtcagggattaacaacagagtgtaggggagattaactgcctcccttccaatagacactatcagcagggacagatgtgtgggagtgcagggctgcagagggtatggggggaggaggctgctaaaccctatcccccagcctcccccctgccctgaagatcttccatttgcttccactcagctggaggctcaagagggcttgatggctgtcccctgcccccctccttttgttttgtacacagagaccaagaggcctcagtttagcaccttagtacctccgctgcttcacttgctttagccaaagccataaaaaacctgcaacgtagagaaaataatgcagataccctgactagccagccctctactcctccaaccttttccaagatatgcaatggcctttgtgcctgcccaaaggcttcgcccctccagtgcatgaggaaccctctttcctccgctcagagatgctgcttcatttacccaggaggtcatattctttatatatattttttgttgcaaagtgtctctctagagaaactctatatattattcgaatttttaaattatttgtttatatataaaagaaaagctcaattggcaaaaaaaaaaaaaaaaaa

SEQ ID NO: 1102 - DNA, 260 bp, Artificial Sequence
  Description of Artificial sequences:primer
  misc_feature (1)..(260): 3' terminal sequence from clone image:470819. tetraspanin similiar to uroplakin 1(LOC90139) gene.
  misc_feature (51)..(51): n is a, c, g, or t
  misc_feature (83)..(83): n is a, c, g, or t
  misc_feature (198)..(198): n is a, c, g, or t
  misc_feature (241)..(241): n is a, c, g, or t
  misc_feature (248)..(248): n is a, c, g, or t
aaaaaaatagctctattcccctggcccttctcctggccatctctgatgctncaatcttctcccctggggccaagaggacagcngggaggggcacgggaggacattgggtgctgggcagtggtgggtggggcgagtcttcaggcttcatgccataccctctactggatgccccggaagaggcacatggcaaagatcatnggcgaaaagtccgatggccaagtacccccgatggcaagggctncggcaangtagacgtaggg

SEQ ID NO: 1103 - DNA, 2942 bp, Artificial Sequence
  Description of Artificial sequences:primer
  misc_feature (1)..(2942): tetraspanin similiar to uroplakin 1(LOC90139) gene.
ataatccttttgcaaacatctcaacgctggctctccaggtggagcaccatggaaggcgactgtctgagctgcatgaagtatctgatgtttgtattcaatttcttcatatttctgggcggggcctgcctgctggccatcggcatctgggtcatggtggaccccaccggcttccgggagatcgtggctgccaatcctctgctcctcacgggcgcctacatcctcctggccatggggggcctgctctttctgctcggcttcctgggctgctgcggggccgtccgtgagaacaagtgtctgctgctatttttcttcctgttcatcctgatcatcttcctggcagagctctcagcagccatcctggccttcatcttcagggaaaatctcacccgagaattcttcaccaaggagctcaccaagcactaccagggcaataacgacacagacgtcttctctgccacctggaactcggtcatgatcacatttggttgctgcggggtcaacgggcctgaagactttaagtttgcatctgtgtttcgactcctgaccctggatagtgaagaggtgccggaggcctgctgccggagggaaccccaaagtcgggacggggtcctgctgagccgggaggagtgcctcctgggaaggagcctattcctaaacaagcagggctgttacacggtgatcctcaacaccttcgagacctacgtctacttggccggagcccttgccatcggggtactggccatcgagcttttcgccatgatctttgccatgtgcctcttccggggcatccagtagagggtatggcctgaagcctgaagactcgccccacccaccactgcccagcacccaatgtcctcccgtgcccctccccgctgtcctcttggccccaggggagaagatgaggccatcagagatggccaggagaagggccaggggaatagagctatttttttaacaaaacaaaatgaggacaaaaatatggactgatgtatcctcgcctggactcagggcaggtgccgtgggttctccagagaccccagcacctggcccaggatgcaggctgctctagagaccaaaggaacaccaggcccagcgccctctttggtccagccagaccctgggccctctctcctcactgcaccaggacctgatgccaagaaagtgaggatttaggcaacaaggaggcaaaagcaaatctcagagaagtcatcaaagcccaggggctgcacggagattcagctgccatgtctttgaggactcggaacccacagcgcaatccctggtccactggaggatggactgttccccccttcaggccggggccaagagtgagctgctaacacggcatccaagaatggcccagctggtaggatccttgctttccccatctgttggaccaaataatctcaaaggcccagagaggacagtgaccatccacagacacgcagcacaggcgtgacagttctgaaaagaagctgagtcgtctccaggctgctgtcactgcatccaggactctgtcagctctgctgcccacatgcacccctggcctcagcatcccggttcccccagacaagagagggcaagtcagccaggaactgcctcctccctgctctacagctaagaaaacaccattccatgacttcccaccgcgccctcgctcctacctccccacacctctctctcagtccccaggaacacacagaggtgcacatcacattcccttgtccacactgcccgcctctcccacatgccacccccttccctgtccttccccaactccccagctccaagagtggaagaaatccccaagatcatctgggtctccctctccacacccagaactgaggcttggatatcttcttcaacatccttgccaagacttctccaccctcttgcatacctccagggacagagagcttactacctcccaaggcagcctcctgcctttggactgctctgactttagcatcagcttaatacacagaagaggtttctgtttttctgtggctctgtccatggcatcccacttgcccactctccttcctggagtgttgaggtcacacattgactcccctgagccctcttctctccaggctaaagaatcccgaaggcatcgaggccatttctgctgcaacaaggtttcctgtctcttcactgtccgcacatttcttagtattccctccaggcttgggcagggagactcgcagatgcacacccacaagtattcagttctcaaactctagacgagtgttggcaactggattgcaagatgctcctaccctgatagatcaggggtggctgctggaggctgtgctggggatctgaggtttggtctgggctcagtgggagatggcagtgcaatcctaatgagtgatgtctgccaggcaccgtaagtttgattagtgatgtctgccacgggcagggatggaaggagcagtgtgatgtctgctctcttctctcccctctgtccctcttcaggaagaaagagctcattctgtctcacaagccaccggcatcctgtatcagcttccagcctcccctcaggctttccagtcaccagggacactcggagccacagcctagagccccgtgttccctggcctgtgcgtctgcccccttctgagatgcagccagaagctctgtgcctgctgcaaagattcaggtggaccctcctctaatctcctcctgctgtgcccgccagtccttgccctcccaccaggtctctgagctcagtcttaccaaattcgccctttaacagcttgctctggcaaccccataaatgacacctgagctccgtagaagctaagctcctgagacccagggggacctgccactggtaccgcggcccagcctggggcctgggggctgcccctcttgaaccacccacatgcttagccccagctttttggaagaggcaaatggctggtctgaggatgacacac

SEQ ID NO: 1104 - DNA, 373 bp, Artificial Sequence
  Description of Artificial sequences:primer
  misc_feature (1)..(373): 3' terminal sequence from clone image:471256. mre11 meiotic recombination 11 homolog a (s. cerevisiae)(MRE11A) gene.
  misc_feature (271)..(271): n is a, c, g, or t
  misc_feature (308)..(308): n is a, c, g, or t
ttaatctttactcaagagtgatattgaaacaaagctcttactacaacaaccaggttaaaaaaacaaggtgaatcaatgctattgtatgtctgtgaactagaaatttcttacttatggagttatgctcaggaaacaatacttaaaatcttaaactgtaaactcttagcttgtaacattttcatttttcctgtatcttgcatgtttctcagtgccattaaatatattatcttctatttcttcttaaagaactaagtgttcataaaaggatcancatcatcatcctcacttggattcaaaatcaacccctnttcgatacttggactctgggacatggatttttgctgggatgatgtgctgggaccaccttttggat

SEQ ID NO: 1105 - DNA, 223 bp, Artificial Sequence
  Description of Artificial sequences:primer
  misc_feature (1)..(223): 5' terminal sequence from clone image:471256. mre11 meiotic recombination 11 homolog a (s. cerevisiae)(MRE11A) gene.
  misc_feature (217)..(217): n is a, c, g, or t
cgtcgtttcagagaaaccagacaaaaaaatactaatgaagaagatgatgaagtccgtgagctatgaccagggccagagcactcagatctcagtcagaggagtctgcttctgcctttagtgctgatgaccttatgagtatagatttagcagaacagatggctaatgactctgatgatagcatctcagcagcaaccaacaaaggaagaggccgaggaanaggtcg

SEQ ID NO: 1106 - DNA, 4852 bp, Artificial Sequence
  Description of Artificial sequences:primer
  misc_feature (1)..(4852): mre11 meiotic recombination 11 homolog a (s. cerevisiae)(MRE11A) gene.
  misc_feature (4260)..(4260): n is a, c, g, t or u
ggacgccgttctctcccgcggaattcaggtttacggccctgcgggttctcagagaatttctagaatttggaatcgagtgcattttctgacatttgagtacagtacccaggggttcttggagaagaacctggtcccagaggagcttgactgaccataaaaatgagtactgcagatgcacttgatgatgaaaacacatttaaaatattagttgcaacagatattcatcttggatttatggagaaagatgcagtcagaggaaatgatacgtttgtaacactcgatgaaattttaagacttgcccaggaaaatgaagtggattttattttgttaggtggtgatctttttcatgaaaataagccctcaaggaaaacattacatacctgcctcgagttattaagaaaatattgtatgggtgatcggcctgtccagtttgaaattctcagtgatcagtcagtcaactttggttttagtaagtttccatgggtgaactatcaagatggcaacctcaacatttcaattccagtgtttagtattcatggcaatcatgacgatcccacaggggcagatgcactttgtgccttggacattttaagttgtgctggatttgtaaatcactttggacgttcaatgtctgtggagaagatagacattagtccggttttgcttcaaaaaggaagcacaaagattgcgctatatggtttaggatccattccagatgaaaggctctatcgaatgtttgtcaataaaaaagtaacaatgttgagaccaaaggaagatgagaactcttggtttaacttatttgtgattcatcagaacaggagtaaacatggaagtactaacttcattccagaacaatttttggatgacttcattgatcttgttatctggggccatgaacatgagtgtaaaatagctccaaccaaaaatgaacaacagctgttttatatctcacaacctggaagctcagtggttacttctctttccccaggagaagctgtaaagaaacatgttggtttgctgcgtattaaagggaggaagatgaatatgcataaaattcctcttcacacagtgcggcagtttttcatggaggatattgttctagctaatcatccagacatttttaacccagataatcctaaagtaacccaagccatacaaagcttctgtttggagaagattgaagaaatgcttgaaaatgctgaacgggaacgtctgggtaattctcaccagccagagaagcctcttgtacgactgcgagtggactatagtggaggttttgaacctttcagtgttcttcgctttagccagaaatttgtggatcgggtagctaatccaaaagacattatccattttttcaggcatagagaacaaaaggaaaaaacaggagaagagatcaactttgggaaacttatcacaaagccttcagaaggaacaactttaagggtagaagatcttgtaaaacagtactttcaaaccgcagagaagaatgtgcagctctcactgctaacagaaagagggatgggtgaagcagtacaagaatttgtggacaaggaggagaaagatgccattgaggaattagtgaaataccagttggaaaaaacacagcgatttcttaaagaacgtcatattgatgccctcgaagacaaaatcgatgaggaggtacgtcgtttcagagaaaccagacaaaaaaatactaatgaagaagatgatgaagtccgtgaggctatgaccagggccagagcactcagatctcagtcagaggagtctgcttctgcctttagtgctgatgaccttatgagtatagatttagcagaacagatggctaatgactctgatgatagcatctcagcagcaaccaacaaaggaagaggccgaggaagaggtcgaagaggtggaagagggcagaattcagcatcgagaggagggtctcaaagaggaagagcagacactggtctggagacttctacccgtagcaggaactcaaagactgctgtgtcagcatctagaaatatgtctattatagatgcctttaaatctacaagacagcagccttcccgaaatgtcactactaagaattattcagaggtgattgaggtagatgaatcagatgtggaagaagacatttttcctaccacttcaaagacagatcaaaggtggtccagcacatcatccagcaaaatcatgtcccagagtcaagtatcgaaaggggttgattttgaatcaagtgaggatgatgatgatgatccttttatgaacactagttctttaagaagaaatagaagataatatatttaatggcactgagaaacatgcaagatacaggaaaaatgaaaatgttacaagctaagagtttacagtttaagattttaagtattgtttcctgagcataactccataagtaagaaatttctagttcacagacatacaatagcattgattcaccttgtttttttaacctggttgttgtagtaagagctttgtttcaatatcactcttgagtaaagattaaaataaagctaccattttacatttctatttcataatgaaaaactatgtcagtattttaatatggttacatttagccaaagttgagggaaagagcttataaaatttaacttcttcataattttagtaatttcctagaggttctgggttttctgaaagtaaaacaatttatgcgaacctatgtctaaattcactgtttgttactatgtatgtttttttccaatgcttcttataagactaaatgattagaagtacctaatagtttgaacagatatgtttttatttaaaagagtagaataacctttcagaattactgagttttttattccagttgtagcaaagatttcaaaagattgtgttcccattaagtggtagtaatttcctttattattctgtatccttaatggtgttctctctctctctctctctctctctctctccctctcccccccgttccccactattcctttctccttggctttttcttctctttcatacatatatgcgtgcctagttctaggaggaaacgggttaaaaattgttttaaactacatcttgaaaatattgaagaatttgttttaggtagagtggtcagttgaaccttacagtaaagtatagaaatatatttaatgtggaatgtcaatgccaggatttctcattaacaatattttatctcaactttggttcctgtgatacatttctgaatgggcaattccagaaatcttagtagcccatgttaagcttctattttttacttgttttcggggagaaataagaattagacatcttcagatttaagttaaataatcccattctttataatcctctgtaaaaagatccctgagattattccttcttctagttttatgcgacagctttactttaaaattcaagttatacatcttgggagtacaatggcccgacatttcttcataggtagaaacaaatacttgactcagtgatactcatgaccattagaatagtcatacctggaatgtgtcaaattataagagacagacacttggttagtggctgcctcatatagcacttttgaagaggcctaagtcaaaacttgcaatataacattctattgactttcttaaaaatattttttctgtacctaacttgagcataagggttatttgagcaagtaacattaactcagtggaaggcattgtcctgtgaaatattcttaggcagatctgcccacatctttattgaacttgaaatctaatatttctagtatttgaacaaagcagaaggttaagtcagggaagagcagtgctgtccatgatgtaatggaagctaccaggggaggcagtgtctggatgatgctgtgctacctacccctgcacaagccatgctggctcagtctgagctgtgggccacatcagctagtggctcttctcatgcatcagttaggtgggtctgggtgagagttatagtgagggaatggtcactaaagtatcctgacaagttcctaggaaaaaaggaataaagtttttttccttaaaaaaaaaaaaattgctcttggctgtgaaaagaggtactaaatgcgattcagttcaccgctaaggaaagtgatgacatagcagttacagagggtgataaatctctccagctaattcaggtcattttgtgaatactatgtatcaagccctgaaaatatggtaaataaaacgtgacagggaaacctttttttgattgaatattgttacatagttaaatgtgctatatatccttaatattttatantgatcctgcaaaatctgttggttttaggggagttttgttttttgtttctaacaattttcagacctgttggtataggaatgtagaagtctttcagatgattgaaagcagctgcatttgctcttggaggctttgggagagcaggaatgaaaacattcagaggaagacatctgtagggaattcttctgttacttaccaaagaataagtgtctttctggtgttttatttcctatcataaaaatacaacagtgcatttacaaggttaaagattcctcgaagttctaggaaattcttgaaaatataagtggtgcttagaaaattcaagcatttaggaatgtgacctttaattcaggtatgtaaaagacttttttcccaaacttttaaaagtaggaaatacaataaatacagaaaagtcatatggttgaataaataattataaattgagcactgatggaatccctctacaggtcaagaaatagcgcagtgtcctggatgcccattatattgttttctcctttctgggtaacaggccctaacttctgtaatttaaaagctcctacttttgccacaaggtggtgcttctgccattagacgc

SEQ ID NO: 1107 - DNA, 508 bp, Artificial Sequence
  Description of Artificial sequences:primer
  misc_feature (1)..(508): 3' terminal sequence from clone image:471918. intercellular adhesion molecule 2(ICAM2) gene.
  misc_feature (143)..(143): n is a, c, g, or t
  misc_feature (164)..(164): n is a, c, g, or t
  misc_feature (168)..(168): n is a, c, g, or t
  misc_feature (249)..(249): n is a, c, g, or t
  misc_feature (251)..(251): n is a, c, g, or t
  misc_feature (357)..(357): n is a, c, g, or t
  misc_feature (411)..(411): n is a, c, g, or t
  misc_feature (418)..(418): n is a, c, g, or t
  misc_feature (425)..(425): n is a, c, g, or t
  misc_feature (442)..(442): n is a, c, g, or t
  misc_feature (458)..(458): n is a, c, g, or t
  misc_feature (464)..(464): n is a, c, g, or t
  misc_feature (469)..(469): n is a, c, g, or t
  misc_feature (497)..(497): n is a, c, g, or t
aagtccaggtgtttgtattcgggctagaaaaggcaatgtcccaagtctctgctgcctgtcacagtccttcagccagggctggacctcaaccctgaggagtcacactgagttccagtgaccaccgtggtgtcggccatgcatcnatggttgctatggccggaacngtgnggcagcctcctccaagccgctcgcaccccgtagtgcccatccgcttgctggcgcaagtgctggccgaagatgaagcagatnanggacagatgtcacgaacagggacagcaacaccgacaccaccgtgactatgatgaccatctggctggtccgacacaggctcatagatctccaacatcttcggggctngagtgtttgtgaaagatgtttgccaccgcgaagacatcaagtcccagcacagcnagggcanggagaangtttgcgggtggccatncttctctgttcagccntgctgntttgnaatgtgggctggtggcttccttgcggangggccttggcc

SEQ ID NO: 1108 - DNA, 1035 bp, Artificial Sequence
  Description of Artificial sequences:primer
  misc_feature (1)..(1035): intercellular adhesion molecule 2(ICAM2) gene.
atctccctccaggcagcccttggctggtccctgcgagcccgtggagactgccagagatgtcctctttcggttacaggaccctgactgtggccctcttcaccctgatctgctgtccaggatcggatgagaaggtattcgaggtacacgtgaggccaaagaagctggcggttgagcccaaagggtccctcgaggtcaactgcagcaccacctgtaaccagcctgaagtgggtggtctggagacctctctaaataagattctgctggacgaacaggctcagtggaaacattacttggtctcaaacatctcccatgacacggtcctccaatgccacttcacctgctccgggaagcaggagtcaatgaattccaacgtcagcgtgtaccagcctccaaggcaggtcatcctgacactgcaacccactttggtggctgtgggcaagtccttcaccattgagtgcagggtgcccaccgtggagcccctggacagcctcaccctcttcctgttccgtggcaatgagactctgcactatgagaccttcgggaaggcagcccctgctccgcaggaggccacagccacattcaacagcacggctgacagagaggatggccaccgcaacttctcctgcctggctgtgctggacttgatgtctcgcggtggcaacatctttcacaaacactcagccccgaagatgttggagatctatgagcctgtgtcggacagccagatggtcatcatagtcacggtggtgtcggtgttgctgtccctgttcgtgacatctgtcctgctctgcttcatcttcggccagcacttgcgccagcagcggatgggcacctacggggtgcgagcggcttggaggaggctgccccaggccttccggccatagcaaccatgagtggcatggccaccaccacggtggtcactggaactcagtgtgactcctcagggttgaggtccagccctggctgaaggactgtgacaggcagcagagacttgggacattgccttttctagcccgaatacaaacacctggactt

SEQ ID NO: 1109 - DNA, 551 bp, Artificial Sequence
  Description of Artificial sequences:primer
  misc_feature (1)..(551): 3' terminal sequence from clone image:472021. benzodiazapine receptor (peripheral)(BZRP) gene.
  misc_feature (334)..(334): n is a, c, g, or t
  misc_feature (354)..(354): n is a, c, g, or t
  misc_feature (398)..(398): n is a, c, g, or t
  misc_feature (406)..(406): n is a, c, g, or t
  misc_feature (441)..(441): n is a, c, g, or t
  misc_feature (506)..(506): n is a, c, g, or t
  misc_feature (530)..(530): n is a, c, g, or t
  misc_feature (543)..(543): n is a, c, g, or t
aggaagtcaaaaactttattcagcttataaaattccatgttccaagaacatgctctaagcatgcagaaagcacaggacactgctcccgggtgggggctcaggtggggccacctctgaagctctgctgacccctgggccaaggctggacagactagcaggcccagtggtcatgaaagcgtgacggccaccacatcacaagcgtgatggcacctgctggtcagctgcagtccctggtgggccgggcactcactctggcagccgcgtcccccacgccagccatggttgtcccgccatacgcagtagttgagtgtggtcgtgaaggccagccaggcanggtaaggggtagagcaggcnggcggccagcgggctcacctggtaccaggccacggtactgtgancagccgcnccacttgaccagcaggagatccaccaaggcccagnccattttgttcgggcaccaaagaagatgggcggccatgccagtttcagggccaagctgccatgtngtagaggcccaggggaaacacagncttctttgttgangccttcca

SEQ ID NO: 1110 - DNA, 242 bp, Artificial Sequence
  Description of Artificial sequences:primer
  misc_feature (1)..(242): 5' terminal sequence from clone image:472021. benzodiazapine receptor (peripheral)(BZRP) gene.
  misc_feature (30)..(30): n is a, c, g, or t
  misc_feature (83)..(83): n is a, c, g, or t
  misc_feature (100)..(100): n is a, c, g, or t
  misc_feature (146)..(146): n is a, c, g, or t
  misc_feature (157)..(157): n is a, c, g, or t
  misc_feature (164)..(164): n is a, c, g, or t
  misc_feature (166)..(166): n is a, c, g, or t
  misc_feature (176)..(176): n is a, c, g, or t
  misc_feature (196)..(196): n is a, c, g, or t
  misc_feature (218)..(220): n is a, c, g, or t
  misc_feature (225)..(225): n is a, c, g, or t
  misc_feature (237)..(238): n is a, c, g, or t
tacggctcctacctggtctggaaagagctngggaggcttcacagagaaggctgtggttcccctgggcctctacactgggcagntggcctgaactggcatngcgcccatcttctttggtgcccgacaaatgggctgggccttgggtngatctcctggntggtcantnggggcggcgncacacttacccgtgggcctnggtaccaggttgagcccgctgnnnggccnggcctgctctannccta

SEQ ID NO: 1111 - DNA, 848 bp, Artificial Sequence
  Description of Artificial sequences:primer
  misc_feature (1)..(848): benzodiazapine receptor (peripheral)(BZRP) gene.
agcggcctggctaactcctgccaggcagtgcccttcccggagcgtgccctcgccgctgagctcccctgaacagcagctgcagcagccatggccccgccctgggtgcccgccatgggcttcacgctggcgcccagcctggggtgcttcgtgggctcccgctttgtccacggcgagggtctccgctggtacgccggcctgcagaagccctcgtggcacccgccccactgggtgctgggccctgtctggggcacgctctactcagccatggggtacggctcctacctggtctggaaagagctgggaggcttcacagagaaggctgtggttcccctgggcctctacactgggcagctggccctgaactgggcatggccccccatcttctttggtgcccgacaaatgggctgggccttggtggatctcctgctggtcagtggggcggcggcagccactaccgtggcctggtaccaggtgagcccgctggccgcccgcctgctctacccctacctggcctggctggccttcgcgaccacactcaactactgcgtatggcgggacaaccatggctggcatgggggacggcggctgccagagtgagtgcccggcccaccagggactgcagctgcaccagcaggtgccatcacgcttgtgatgtggtggccgtcacgctttcatgaccactgggcctgctagtctgtcagggccttggcccaggggtcagcagagcttcagaggttgccccacctgagcccccacccgggagcagtgtcctgtgctttctgcatgcttagagcatgttcttggaacatggaattttataagctgaataaagtttttgacttccttta

SEQ ID NO: 1112 - DNA, 453 bp, Artificial Sequence
  Description of Artificial sequences:primer
  misc_feature (1)..(453): 5' terminal sequence from clone image:47986.
  misc_feature (48)..(48): n is a, c, g, or t
  misc_feature (141)..(141): n is a, c, g, or t
  misc_feature (237)..(237): n is a, c, g, or t
  misc_feature (248)..(248): n is a, c, g, or t
  misc_feature (255)..(255): n is a, c, g, or t
  misc_feature (260)..(260): n is a, c, g, or t
  misc_feature (367)..(367): n is a, c, g, or t
  misc_feature (391)..(391): n is a, c, g, or t
  misc_feature (438)..(438): n is a, c, g, or t
  misc_feature (451)..(451): n is a, c, g, or t
ccacaaggacttcctgtccagctccaacctgcaaagatctgtcctcanccttgccagagatccaaaagaagcccccagctaagaacctggaacttggggagttaagacctggcagctctggacagccccaccctggtggcncaacaaagaacactaactatgcatggtgccccaggaccagctcaggacagatgccacacaaggatagatgctggcccagggccagaagcccagctncaaggggaatnagaactnaaatngggccagatccagcctggggtctggagttgatctggaacccagacttcagacattggcaccttaattccagggcagattccagggacttattattttggggccttgnttccagaaccttgattcctggganggcccagtttcacccttgattttagggagaaaggccagggatttttncccagggaccttntt

SEQ ID NO: 1113 - DNA, 504 bp, Artificial Sequence
  Description of Artificial sequences:primer
  misc_feature (1)..(504): 3' terminal sequence from clone image:484874. integrin, beta 3 (platelet glycoprotein iiia, antigen cd61)(ITGB3) gene.
  misc_feature (122)..(122): n is a, c, g, or t
  misc_feature (486)..(486): n is a, c, g, or t
ttttttttttttttgttttacattttagattttactttcttgtgtcgttttacaaaagaaaggtattaattaccttggaaaggctggcgactggtgagggactgaaggtaaagaaatatttncctttgcaatcaactgtgcatacacaaacaaaggtaaccaaattgtaagtttttcaaattcctgagagtgaagttcacgtaacagaaatggcttacgcaacagaagcctcagaggaaaagattggtggatccattacatctaacttagaatgactttcaggaaacgtatttttcttgcccatattttttttctggtggaagggggccatttttagtcactacaaaaggaagaaagggggttgggtgcccacagatgctccaggacaaaggccctgcccagcccacctcaccgtgtctccaatcttgagtcccatacaagacttgaggccagggatgacctcattgttgaggcagggggcattgnaggatagagacaactctt

SEQ ID NO: 1114 - DNA, 3997 bp, Artificial Sequence
  Description of Artificial sequences:primer
  misc_feature (1)..(3997): integrin, beta 3 (platelet glycoprotein iiia, antigen cd61)(ITGB3) gene.
gcgggaggcggacgagatgcgagcgcggccgcggccccggccgctctgggcgactgtgctggcgctgggggcgctggcgggcgttggcgtaggagggcccaacatctgtaccacgcgaggtgtgagctcctgccagcagtgcctggctgtgagccccatgtgtgcctggtgctctgatgaggccctgcctctgggctcacctcgctgtgacctgaaggagaatctgctgaaggataactgtgccccagaatccatcgagttcccagtgagtgaggcccgagtactagaggacaggcccctcagcgacaagggctctggagacagctcccaggtcactcaagtcagtccccagaggattgcactccggctccggccagatgattcgaagaatttctccatccaagtgcggcaggtggaggattaccctgtggacatctactacttgatggacctgtcttactccatgaaggatgatctgtggagcatccagaacctgggtaccaagctggccacccagatgcgaaagctcaccagtaacctgcggattggcttcggggcatttgtggacaagcctgtgtcaccatacatgtatatctccccaccagaggccctcgaaaacccctgctatgatatgaagaccacctgcttgcccatgtttggctacaaacacgtgctgacgctaactgaccaggtgacccgcttcaatgaggaagtgaagaagcagagtgtgtcacggaaccgagatgccccagagggtggctttgatgccatcatgcaggctacagtctgtgatgaaaagattggctggaggaatgatgcatcccacttgctggtgtttaccactgatgccaagactcatatagcattggacggaaggctggcaggcattgtccagcctaatgacgggcagtgtcatgttggtagtgacaatcattactctgcctccactaccatggattatccctctttggggctgatgactgagaagctatcccagaaaaacatcaatttgatctttgcagtgactgaaaatgtagtcaatctctatcagaactatagtgagctcatcccagggaccacagttggggttctgtccatggattccagcaatgtcctccagctcattgttgatgcttatgggaaaatccgttctaaagtagagctggaagtgcgtgacctccctgaagagttgtctctatccttcaatgccacctgcctcaacaatgaggtcatccctggcctcaagtcttgtatgggactcaagattggagacacggtgagcttcagcattgaggccaaggtgcgaggctgtccccaggagaaggagaagtcctttaccataaagcccgtgggcttcaaggacagcctgatcgtccaggtcacctttgattgtgactgtgcctgccaggcccaagctgaacctaatagccatcgctgcaacaatggcaatgggacctttgagtgtggggtatgccgttgtgggcctggctggctgggatcccagtgtgagtgctcagaggaggactatcgcccttcccagcaggacgaatgcagcccccgggagggtcagcccgtctgcagccagcggggcgagtgcctctgtggtcaatgtgtctgccacagcagtgactttggcaagatcacgggcaagtactgcgagtgtgacgacttctcctgtgtccgctacaagggggagatgtgctcaggccatggccagtgcagctgtggggactgcctgtgtgactccgactggaccggctactactgcaactgtaccacgcgtactgacacctgcatgtccagcaatgggctgctgtgcagcggccgcggcaagtgtgaatgtggcagctgtgtctgtatccagccgggctcctatggggacacctgtgagaagtgccccacctgcccagatgcctgcacctttaagaaagaatgtgtggagtgtaagaagtttgaccgggagccctacatgaccgaaaatacctgcaaccgttactgccgtgacgagattgagtcagtgaaagagcttaaggacactggcaaggatgcagtgaattgtacctataagaatgaggatgactgtgtcgtcagattccagtactatgaagattctagtggaaagtccatcctgtatgtggtagaagagccagagtgtcccaagggccctgacatcctggtggtcctgctctcagtgatgggggccattctgctcattggccttgccgccctgctcatctggaaactcctcatcaccatccacgaccgaaaagaattcgctaaatttgaggaagaacgcgccagagcaaaatgggacacagccaacaacccactgtataaagaggccacgtctaccttcaccaatatcacgtaccggggcacttaatgataagcagtcatcctcagatcattatcagcctgtgccacgattgcaggagtccctgccatcatgtttacagaggacagtatttgtggggagggatttggggctcagagtggggtaggttgggagaatgtcagtatgtggaagtgtgggtctgtgtgtgtgtatgtgggggtctgtgtgtttatgtgtgtgtgttgtgtgtgggagtgtgtaatttaaaattgtgatgtgtcctgataagctgagctccttagcctttgtcccagaatgcctcctgcagggattcttcctgcttagcttgagggtgactatggagctgagcaggtgttcttcattacctcagtgagaagccagctttcctcatcaggccattgtccctgaagagaagggcagggctgaggcctctcattccagaggaagggacaccaagccttggctctaccctgagttcataaatttatggttctcaggcctgactctcagcagctatggtaggaactgctgggcttggcagcccgggtcatctgtacctctgcctcctttcccctccctcaggccgaaggaggagtcagggagagctgaactattagagctgcctgtgccttttgccatcccctcaacccagctatggttctctcgcaagggaagtccttgcaagctaattctttgacctgttgggagtgaggatgtctgggccactcaggggtcattcatggcctgggggatgtaccagcatctcccagttcataatcacaacccttcagatttgccttattggcagctctactctggaggtttgtttagaagaagtgtgtcacccttaggccagcaccatctctttacctcctaattccacaccctcactgctgtagacatttgctatgagctggggatgtctctcatgaccaaatgcttttcctcaaagggagagagtgctattgtagagccagaggtctggccctatgcttccggcctcctgtccctcatccatagcacctccacatacctggccctgagccttggtgtgctgtatccatccatggggctgattgtatttaccttctacctcttggctgccttgtgaaggaattattcccatgagttggctgggaataagtgccaggatggaatgatgggtcagttgtatcagcacgtgtggcctgttcttctatgggttggacaacctcattttaactcagtctttaatctgagaggccacagtgcaattttattttatttttctcatgatgaggttttcttaacttaaaagaacatgtatataaacatgcttgcattatatttgtaaatttatgtgtatggcaaagaaggagagcataggaaaccacacagacttgggcagggtacagacactcccacttggcatcattcacagcaagtcactggccagtggctggatctgtgaggggctctctcatgatagaaggctatggggatagatgtgtggacacattggacctttcctgaggaagagggactgttcttttgtcccagaaaagcagtggctccattggtgttgacatacatccaacattaaaagccacccccaaatgcccaagaaaaaaagaaagacttatcaacatttgttccatgagg

SEQ ID NO: 1115 - DNA, 483 bp, Artificial Sequence
  Description of Artificial sequences:primer
  misc_feature (1)..(483): 3' terminal sequence from clone image:485742. similar to hypothetical protein bc015353.
  misc_feature (464)..(464): n is a, c, g, or t
tttttttttattaattaaaataatttaattaacaaaagtacacattcaaggtggttatcccattcataaccacatagtaattacattccatgaagttacaatgagctcacaggctctcgcacatagtgtcttaggacagtatttgcctcatatgtgggaggtcacaataaatcatcgtgaaaccaacttttcatgtacaaccaaagcaaaagaaaggcctcagaggggaagagaaggaggaaggaggaaaaccatagataagagaacctttagaaacatcaaaaaaactcacagatccattatcataatccagaaacaccccaactttgacccagaggcctttgcacatactgaattaaaggtgggagagttggtggagagactatagtgattgctcctctttgaggaaattaaaaaaaaatctttcatcagaatccataacggaattgggcatctgcagtccngggaatctttgacagactc

SEQ ID NO: 1116 - DNA, 442 bp, Artificial Sequence
  Description of Artificial sequences:primer
  misc_feature (1)..(442): 5' terminal sequence from clone image:485742. similar to hypothetical protein bc015353.
  misc_feature (256)..(256): n is a, c, g, or t
aatgtatcagcaaggactgatttggcacagatgcaaaagccccagccagtgaacccagagctcacttcatggtgcataactggagtcctagacatgctcaacaacttcagagtggatagtgctctgagcacggaaatgattccttgctatataagcctttctgaggatgtgagatatgtgatatttggagatgaccatctcagtgctcccacggatccccagggagtggacagctttgctgtgtggggagcgcaanattcacctccggcaagcattactgggaggtggatgtgaccctctcctccaactggattctgggagtctgtcaagattccaggactgcagattgccaatttccgttattgattctgatgaaagattttttttaatttcctcaaagaggagcaatcactatagtctctccaccaactctccaccttta

SEQ ID NO: 1117 - DNA, 446 bp, Artificial Sequence
  Description of Artificial sequences:primer
  misc_feature (1)..(446): 3' terminal sequence from clone image:486151. chaperone, abc1 activity of bc1 complex like (s. pombe)(CABC1) gene.
  misc_feature (91)..(91): n is a, c, g, or t
  misc_feature (167)..(167): n is a, c, g, or t
  misc_feature (257)..(257): n is a, c, g, or t
  misc_feature (296)..(296): n is a, c, g, or t
  misc_feature (311)..(311): n is a, c, g, or t
  misc_feature (367)..(367): n is a, c, g, or t
  misc_feature (374)..(374): n is a, c, g, or t
  misc_feature (385)..(385): n is a, c, g, or t
  misc_feature (397)..(397): n is a, c, g, or t
  misc_feature (427)..(427): n is a, c, g, or t
tttttttttttttttttttttttttttttttttttttttttgcacttcccatgagcatttttattaaattgaaacaagttgttgattcganaattacaagacttgtacaaaaattcacagcgcctgtgaggagcctttggtgggaactggtgacacctggtgcctcnccggacagaggaaggaagtcccaccccgccttccagcagcagcgagcctgtgtctggcattccctgttccgctgctcccaccctcactgnggggcagcagttctttaggaacattcagctgtcaaaggngagaaccagccccanaggcctgggctcgcaggcttaaggagcacttgttggcactgttagctcagcacctntcccagntccagcccatnggcttggagganggaaaaggggcagaaaacacaaatctcacnctggaaacacatacacata

SEQ ID NO: 1118 - DNA, 196 bp, Artificial Sequence
  Description of Artificial sequences:primer
  misc_feature (1)..(196): 5' terminal sequence from clone image:486151. chaperone, abc1 activity of bc1 complex like (s. pombe)(CABC1) gene.
tgatgtgaatgttaagcagaagggagagagtccttactcccttccaatctctgttcagtgcaaaacccagaaacatgaacagatacgattgtgggatttttatcatctgtgtagtaggtgtgtgtatgtgtttctagagtgagatttgtgttttctgcccttttcctctccagcccgatgggctggagcttgggaa

SEQ ID NO: 1119 - DNA, 2922 bp, Artificial Sequence
  Description of Artificial sequences:primer
  misc_feature (1)..(2922): chaperone, abc1 activity of bc1 complex like (s. pombe)(CABC1) gene.
ggcacgagggttggtaaacagatccggagcgcgtggcgggcgtcagcgcggtggccagcgcgcagaggcgggcgcggaggcggctagaaggtgaccgcggatcccagcttcctgcagccagccctgaaggatggctgccatattgggagacaccatcatggtggctaaaggccttgtcaagctgacccaggcggccgtggaaacccacctgcagcacttgggcatcggaggggagctgatcatggcggccagggccctgcagtccacggctgtggagcagattggcatgttcttggggaaggtgcagggtcaggataaacatgaagaatattttgctgagaacttcggcggcccagaaggggagttccacttctcagtcccgcatgcagccggagcctccacagacttctcttcagcctccgctcccgaccagtcagcgcccccatccctgggtcatgcccacagcgagggcccagctcctgcctacgtggccagtggaccctttagagaagccgggttccccggccaggcctcctcccctctgggcagggccaacgggaggctctttgcaaaccccagagactcattctctgccatgggctttcagcgaaggttcttccaccaggaccaatcccctgttgggggcctcacagccgaggacattgagaaggcccggcaggctaaggctcgccccgagaacaagcagcacaaacagacgctcagcgagcatgcccgggagcggaaggtgcctgtgacgaggattggccggctggccaacttcggaggtctggccgtgggcctgggcttcggggcactggcagaggtcgccaagaagagcctgcgctccgaggacccctcagggaagaaggccgtgctgggttccagtcctttcctgtccgaggccaatgcagagcggatcgtgcgcacgctctgcaaggtgcgtggtgcggcactcaagctgggccagatgctgagcatccaggatgatgcctttatcaacccccacctggctaagatcttcgagcgggtgcggcagagcgcggacttcatgccactgaagcagatgatgaaaactctcaacaacgacctgggccccaactggcgggacaagttggaatacttcgaggagcggcccttcgccgccgcatccattgggcaggtgcacttggcccgaatgaagggcggccgcgaggtggccatgaagatccagtaccctggcgtggcccagagcatcaacagtgatgtcaacaacctcatggccgtgttgaacatgagcaacatgcttccagaaggcctgttccccgagcacctgattgacgtgctgaggcgggagctggccctggagtgtgactaccagcgagaggccgcctgtgcccgcaagttcagggacctgctgaagggccaccccttcttctatgtgcctgagattgtggatgagctctgcagcccacatgtgctgaccacagagctggtgtctggcttccccctggaccaggccgaagggctcagccaggagattcggaacgagatctgctacaacatcctggttctgtgcctgagggagctgttcgagttccacttcatgcaaacagaccccaactggtccaacttcttctatgacccccagcagcacaaggtggctcttttggattttggggcaacgcgggaatatgacagatccttcaccgacctctacattcagatcatcagggctgctgccgacagggacagggagactgtgcgggcgaaatccatagagatgaagttcctcaccggctacgaggtcaaggtcatggaagacgcccacttggatgccatcctcatcctgggggaggccttcgcctctgatgagccttttgattttggcactcagagcaccaccgagaagatccacaacctgattcccgtcatgctgaggcaccgtctcgtccccccacccgaggaaacctactccctgcacaggaagatggggggctccttcctcatctgctccaagctgaaggcccgcttcccctgcaaggccatgttcgaggaggcctacagcaactactgcaagaggcaggcccagcagtagggctgcgggccacgcccaggccggctccgcgggaactctctccctcagacaggccaaaaaccagtagcgaggtcgtggtgatgctctttttaactcctttgcccaataaggggggtggctgcctggagccccgtagccagcgctttccacggtttctgttgctaaatggttgtagggtgagaagtgcaagaatgaagatgaagccccactgctcggtcagtctgcctccgtgtgtcctctgaaataagcagatgaagatgaaagggcaactttgttttcttctttttcctgatgtgaatgttaagcagaagggagagagtccttactcccttccaatctctgttcagtgcaaaacccagaaacatgaacagatacgattgtgggattttatcatctgtgtagtaggtgtgtgtatgtgtttctagagtgagatttgtgttttctgcccttttcctctccagccaatgggctggagctgggagaggtgctgagctaacagtgccaacaagtgctccttaagcctgcgaggcccaggcctgtggggctggttctcacctttgacagctgaatgttcctaaagaactgctgccccacagtgagggtgggagcagcggaacagggaatgccagacacaggctcgctgctgctggaaggcggggtgggacttccttcctctgtccggagaggcacaggtgtcaccagttccagccaaaggctcctcacaggcgctgtgaatttttgtacaagtcttgtaattatcgaatcaacaacttgtttcaatttaataaaaatgctcatgggaagtgaaaaaaaaaaaaaaaaaaaaaaaaaaaaaaaaaaaaaaaaaa

SEQ ID NO: 1120 - DNA, 460 bp, Artificial Sequence
  Description of Artificial sequences:primer
  misc_feature (1)..(460): 3' terminal sequence from clone image:486400. putative nucleic acid binding protein ry-1(RY1) gene.
tttttttttaaaagggtagaaatactgctttattggataaacttacttccaaattactttcatgttttttaagaagtcctaatgagcattcaggaagaaaacatatactgcttccacaggaataaggacaaataaaatggggttgacgcctgccacaaatcgatatttctttacaagaaaggagaactgagatcctgttttttgaatgcaagttaaatacaaaatacaaaatccactctctgaccaagatgaggggaaaaaaaatcatccttcaacacttcaattctcatgcaatgaaatccaaaggtctgttgaatccacctttttcgattcatgtactgcctgtacttcctcttctgagagacatttatggcataggcattttacagagccatccaccttcttaccctttgtggagtcaaaggaggcaaatcccattaacttcatcattccaattctt

SEQ ID NO: 1121 - DNA, 239 bp, Artificial Sequence
  Description of Artificial sequences:primer
  misc_feature (1)..(239): 5' terminal sequence from clone image:486400. putative nucleic acid binding protein ry-1(RY1) gene.
  misc_feature (113)..(113): n is a, c, g, or t
  misc_feature (226)..(226): n is a, c, g, or t
gactccaaatgggtcgcagtcgcagccgctctccacggagggaacgtaggcgttccgataccacatcccgggagagagaacgcaggcgccgagaaaggtccaggtctcggganagagatcggagaaggagccgctcgcgatccccgcaccgaagacgctcccgatctccaagaccgacatagatccacatctccttccccttctcgactgaaagaaagaagagatnaggaaaagaaaga

SEQ ID NO: 1122 - DNA, 1433 bp, Artificial Sequence
  Description of Artificial sequences:primer
  misc_feature (1)..(1433): putative nucleic acid binding protein ry-1(RY1) gene.
agttgtttccgggaagcgggactccaaatgggtcgcagtcgcagccgctctccacggagggaacgtaggcgttcccggtccacatcccgggagagagaacgcaggcgccgagaaaggtccaggtctcgggagagagatcggagaaggagccgctcgcgatccccgcaccgaagacgctcccgatctccaagacgacatagatccacatctccttccccttctcgactgaaagaaagaagagatgaggaaaagaaagaaacaaaagaaacaaagagcaaagaacggcagattactgaggaagacttagagggcaaaacagaggaagaaatagaaatgatgaagttaatgggatttgcctcctttgactccacaaaaggtaagaaggtggatggctctgtaaatgcctatgccataaatgtctctcagaagaggaagtacaggcagtacatgaatcgaaaaggtggattcaacagacctttggatttcattgcatgagaattgaagtgttgaaggatgattttttttcccctcatcttggtcagagagtggattttgtattttgtatttaacttgcattcaaaaaacaggatctcagttctcctttcttgtaaagtaagaaaatcttatttatgatatatgcagttaacttaccttgcctcaacagaagaaaggttaaatattacatttttttcttttaggaaatatcatttgtggcaggcgtcaaccccattttatttgtccttattcctgtggaagcagtatatgttttcttcctgaatgctcattaggacttcttaaaaaacatgaaagtaatttggaagtaagtttatccaataaagcagtatttctacccttttagatttgataaatatttttattactaaagaatctccccagacattttcttttttttttcacacatagatttaagtatcttgattgttagtagtctaaaaatgggaagaatgaaaaagcataactagatttttctatcttctgtggtcgcccgccccccccaaaaaaaataccatttatggttctctccgcaagtataaaagcgttacatgcaaaaaaaagatctcagagaaaacaaaagtaaaagaaaagcagaaaatcacctgttatctactcccagaaataatcaatttcaacattttggtatatgtttttccaggcttctttgggttgatcccacctatgagatcagaatatgtatgcagttctttctttaacccttttttctcctatgtactgtgaacatttaaaaagtacttttaaatattctttggaaacttagcttttagtaactacttggttgtatcataatttattaactaatgttttattggtaaacattggcttgcctcccatgacttgccattataattaaaactgtgactactaaaaaaaaaaaaaaaaaaaaaaaaaaaaaa

SEQ ID NO: 1123 - DNA, 432 bp, Artificial Sequence
  Description of Artificial sequences:primer
  misc_feature (1)..(432): 3' terminal sequence from clone image:486510. cadherin 13, h-cadherin (heart)(CDH13) gene.
  misc_feature (4)..(4): n is a, c, g, or t
  misc_feature (322)..(322): n is a, c, g, or t
  misc_feature (392)..(392): n is a, c, g, or t
  misc_feature (414)..(414): n is a, c, g, or t
  misc_feature (419)..(419): n is a, c, g, or t
  misc_feature (425)..(425): n is a, c, g, or t
tttntttttttaaccaccaatacccatttattttaatggaaaaaaaaatctctgcattctatatgttccaaaaggatttaccattgaaacaaatacaatatatggaactctatctgtataatttcactacaacaaagacaacatatgacttctacttcctacagaaggctaactgaaagcacaagtgcaaacatagattgcataagaaagcgtgtgtgtgtgcatgtgcggttaaaacctttagtaagcaactgcattaaaatatgctaagacactcaccttaccctagttcgtggcgagctctaataaaaagccacaagcngtcactaggttttatttgataggaaaaattttggtgtgagctttgatggattccttttaaggggtttatncaaccaaggaagggtaatcctnagaancaagcncctaact

SEQ ID NO: 1124 - DNA, 493 bp, Artificial Sequence
  Description of Artificial sequences:primer
  misc_feature (1)..(493): 5' terminal sequence from clone image:486510. cadherin 13, h-cadherin (heart)(CDH13) gene.
  misc_feature (400)..(400): n is a, c, g, or t
  misc_feature (431)..(431): n is a, c, g, or t
agatcatggtagagaatctctccctcctcagtaaatgtacaactgcacctgtcatcatggaggtcatacatgcatacaaagaggtgtacaggtaccatcttgtatacacatatatacccacatgtacagacatacatttatgcacattcacgctgtttgtttcatatatacaggcataaaatagagtaaatacaggtagttttaaaagtacccttttgtgtgaattgactaccgttgtttgcaaacccgaaaataaaagacgttcattatgtatgaaaagtaactgatttgtattctgtgagcatgtaaaagcggaaagttagtgcttgttctaagattaccttcttgttgataaaccataaatgaatccatcaaagctcacaccaaatttttcctatcnaaataaaactagtggacagcttgtggctttnttattagagctcgccacgaactagggtaaggtgagtggtccttagcatattttaatgcagtt

SEQ ID NO: 1125 - DNA, 3840 bp, Artificial Sequence
  Description of Artificial sequences:primer
  misc_feature (1)..(3840): cadherin 13, h-cadherin (heart)(CDH13) gene.
gggaagttggctggctggcgaggcagagcctctcctcaaagcctggctcccacggaaaatatgctcagtgcagccgcgtgcatgaatgaaaacgccgccgggcgcttctagtcggacaaaatgcagccgagaactccgctcgttctgtgcgttctcctgtcccaggtgctgctgctaacatctgcagaagatttggactgcactcctggatttcagcagaaagtgttccatatcaatcagccagctgaattcattgaggaccagtcaattctaaacttgaccttcagtgactgtaagggaaacgacaagctacgctatgaggtctcgagcccatacttcaaggtgaacagcgatggcggcttagttgctctgagaaacataactgcagtgggcaaaactctgttcgtccatgcacggaccccccatgcggaagatatggcagaactcgtgattgtcggggggaaagacatccagggctccttgcaggatatatttaaatttgcaagaacttctcctgtcccaagacaaaagaggtccattgtggtatctcccattttaattccagagaatcagagacagcctttcccaagagatgttggcaaggtagtcgatagtgacaggccagaaaggtccaagttccggctcactggaaagggagtggatcaagagcctaaaggaattttcagaatcaatgagaacacagggagcgtctccgtgacacggaccttggacagagaagtaatcgctgtttatcaactatttgtggagaccactgatgtcaatggcaaaactctcgaggggccggtgcctctggaagtcattgtgattgatcagaatgacaaccgaccgatctttcgggaaggcccctacatcggccacgtcatggaagggtcacccacaggcaccacagtgatgcggatgacagcctttgatgcagatgacccagccaccgataatgccctcctgcggtataatatccgtcagcagacgcctgacaagccatctcccaacatgttctacatcgatcctgagaaaggagacattgtcactgttgtgtcacctgcgctgctggaccgagagactctggaaaatcccaagtatgaactgatcatcgaggctcaagatatggctggactggatgttggattaacaggcacggccacagccacgatcatgatcgatgacaaaaatgatcactcaccaaaattcaccaagaaagagtttcaagccacagtcgaggaaggagctgtgggagttattgtcaatttgacagttgaagataaggatgaccccaccacaggtgcatggagggctgcctacaccatcatcaacggaaaccccgggcagagctttgaaatccacaccaaccctcaaaccaacgaagggatgctttctgttgtcaaaccattggactatgaaatttctgccttccacaccctgctgatcaaagtggaaaatgaagacccactcgtacccgacgtctcctacggccccagctccacagccaccgtccacatcactgtcctggatgtcaacgagggcccagtcttctacccagaccccatgatggtgaccaggcaggaggacctctctgtgggcagcgtgctgctgacagtgaatgccacggaccccgactccctgcagcatcaaaccatcaggtattctgtttacaaggacccagcaggttggctgaatattaaccccatcaatgggactgttgacaccacagctgtgctggaccgtgagtccccatttgtcgacaacagcgtgtacactgctctcttcctggcaattgacagtggcaaccctcccgctacgggcactgggactttgctgataaccctggaggacgtgaatgacaatgccccgttcatttaccccacagtagctgaagtctgtgatgatgccaaaaacctcagtgtagtcattttgggagcatcagataaggatcttcacccgaatacagatcctttcaaatttgaaatccacaaacaagctgttcctgataaagtctggaagatctccaagatcaacaatacacacgccctggtaagccttcttcaaaatctgaacaaagcaaactacaacctgcccatcatggtgacagattcagggaaaccacccatgacgaatatcacagatctcagggtacaagtgtgctcctgcaggaattccaaagtggactgcaacgcggcaggggccctgcgcttcagcctgccctcagtcctgctcctcagcctcttcagcttagcttgtctgtgagaactcctgacgtctgaagcttgactcccaagtttccatagcaacaggaaaaaaaaaaatctatccaatctgaagattgcggtttacagctatcgaacttcacaactaggcctcaattgttccggttttttattttctttacaatttcacttagtctgtacttcatcattttgacagcatcttcctccctcctttaattaatggaatcttctgaattttccctgaatgtttaaagatcatgacatatgacttgatcttctgggagcaggaacaatgactactttttctggtgtgttaacatgtcgctagccagtgctccaggcacccagctttgtctgtgggttagtattggtgtatgtatgagtatctgtatgtatatatacacggtatttatagagagagactatcctggagaagcctcgttttgatgccattcttccttgcaaggttaagcaaggtgggtggaaactaagacacctgaaccctccagggcctcccgcatcaaggtcagcatgaggacagaccacagagctgtcacttttgctccgaagctacttctccactgtcccgttcagtctgaatgctgccacaaccagccaggcaggtccacagagagggagagcagagaaagaagtcctttctctttattgagttcgaggactacaaccaatttacactgccatctgatgccgtgatcctgagccaaggaggtgaggagcagagcaggcaatttcaccaccaaatgccaagaaaagggctgacattttctttcatgggcaccaacctgcatttgtatgtgtcccgaatccacagtcgtactgattctaatggggacacagatcatggtagagaatctctccctcctcagtaaatgtacaactgcacctgtcatcatggaggtcatacatgcatacaaagaggtgtacaggtaccatcttgtatacacatatatacccacatgtacagacatacatttatgcacattcacgctgtttgtttcatatatacaggcataaaatagagtaaatacaggtagttttaaaagtacccttttgtgtgaattgactaccgttgtttgcaaacccgaaaataaaagacgttcattatgtatgaaaagtaactgatttgtattctgtgagcatgtaaaagcggaaagttagtgcttgttctaagattaccttcttgttgataaaccataaatgaatcatcaaagctcacaccaaatttttctatcaaataaaactagtgacagcttgtggctttttattagagctcgccacgaactagggtaaggtgagtgtcttagcatattttaatgcagttgcttactaaaggttttaaccgcacatgcacacacacacgctttcttatgcaatctatgtttgcacttgtgctttcagttagccttctgtaggaagtagaagtcatatgttgtctttgttgtagtgaaattatacagatagagttccatatattgtatttgtttcaatggtaaatccttttggaacatatagaatgcagagatttttttttccattaaaataaatgggtattggtggttaaaaaaaaaaaaaaaaa

SEQ ID NO: 1126 - DNA, 429 bp, Artificial Sequence
  Description of Artificial sequences:primer
  misc_feature (1)..(429): 3' terminal sequence from clone image:486702. signal recognition particle 19kda(SRP19) gene.
agtttaggtatcatttctgctgcatacaacattactgacttacgtgatgggaactgtacaaggcagaggctcccatcttcctgtttgagctggacccggactctgcctctgtattggacatcacgattccattctctagagtacattttatttttctcaagaaatacgttaagtccaactgctgaacatacatcttgaatctctgtagctgtaggattttcaacagccttacttatggggattcgccttccctctgcgatggtcttcttattatttaaataagcaggatagatacaaataaacctgtcctggtcggccggggaccgcgcggcagaaagcccattctttcacaagagtctcaacaacccaggagccgcaggagaaacccggcagaaacccgggaggaacccggctctgagtttccgcctc

SEQ ID NO: 1127 - DNA, 406 bp, Artificial Sequence
  Description of Artificial sequences:primer
  misc_feature (1)..(406): 5' terminal sequence from clone image:486702. signal recognition particle 19kda(SRP19) gene.
  misc_feature (99)..(99): n is a, c, g, or t
  misc_feature (243)..(243): n is a, c, g, or t
  misc_feature (289)..(289): n is a, c, g, or t
  misc_feature (320)..(320): n is a, c, g, or t
  misc_feature (349)..(349): n is a, c, g, or t
  misc_feature (394)..(394): n is a, c, g, or t
  misc_feature (396)..(396): n is a, c, g, or t
  misc_feature (398)..(398): n is a, c, g, or t
cggaaactcagagccgggttcctcccgggtttctgccgggtttctccctgcggctcctgggttgttgagactcttgtgaagatggcttgcgctgccgcnggatccccggccgaccaggacaggtttatttgtatctatcctgcttatttaaataataagaagaccatcgcagagggaaggcgaatccccataagtaaggctgttgaaaatcctacaagctacagagattccaggatgtaggtncagcagttggacttaacgtatttcttgagaaaaataaaatgtactnctagagaatgggaatcgtgatgtccaatacnggggcagagtccgggtccagctcaaacanggaagattgggagcctctgccttgtacagttcccatccacgtaantncngtaatgtt

SEQ ID NO: 1128 - DNA, 894 bp, Artificial Sequence
  Description of Artificial sequences:primer
  misc_feature (1)..(894): signal recognition particle 19kda(SRP19) gene.
cggaaactcagagccgggttcctcccgggtttctgccgggtttctccctgcggctcctgggttgttgagactcttgtgaagatggcttgcgctgccgcgcggtccccggccgaccaggacaggtttatttgtatctatcctgcttatttaaataataagaagaccatcgcagagggaaggcgaatccccataagtaaggctgttgaaaatcctacagctacagagattcaagatgtatgttcagcagttggacttaacgtatttcttgagaaaaataaaatgtactctagagaatggaatcgtgatgtccaatacagaggcagagtccgggtccagctcaaacaggaagatgggagcctctgccttgtacagttcccatcacgtaagtcagtaatgttgtatgcagcagaaatgatacctaaactaaaaacaaggacacaaaaaacaggaggtgctgaccaaagtcttcaacaaggagagggaagtaaaaaagggaaaggaaagaaaaagaagtaacctagtatcagcatcaagtatgtggtactactgtaagagacatgaatggagacttctaatttgtatcggagggaaacagaagctttttgtttgcatcatttaactgaactgtgaacccttgtgcctctcatctttatcatcggagttgacagtgaaacaaatttacatcagaagtttgcatctcgcgtatatgccgtataaaagaatttttttgtctttcaatgcagttttttggaagaaaatatttttaaatggacaatggactgtacaataagttacttgaaataagttgtttcagataaatttcaattagatttaaaataaacattatgtccaccttttaagttaatgaaataaaatttgaaactgaaaaaaaaa

SEQ ID NO: 1129 - DNA, 431 bp, Artificial Sequence
  Description of Artificial sequences:primer
  misc_feature (1)..(431): 5' terminal sequence from clone image:488144. macrophage migration inhibitory factor (glycosylation-inhibiting factor)(MIF) gene.
  misc_feature (58)..(58): n is a, c, g, or t
  misc_feature (174)..(174): n is a, c, g, or t
  misc_feature (230)..(230): n is a, c, g, or t
  misc_feature (246)..(246): n is a, c, g, or t
  misc_feature (261)..(261): n is a, c, g, or t
  misc_feature (285)..(285): n is a, c, g, or t
  misc_feature (332)..(332): n is a, c, g, or t
  misc_feature (334)..(335): n is a, c, g, or t
  misc_feature (410)..(410): n is a, c, g, or t
  misc_feature (431)..(431): n is a, c, g, or t
gcttttttttttttttttttagtctctaaaccgtttatttctccccaccagaaggttngggtgggcgggcctagaacacagcgtgcggcgggttcccgggtggagccagcgcagacagcgtgggtccctgcggctcttaggcgaaggtggagttgttccagcccacattggccntgttcatgtcgtaatagttgatgtagaccctgtccgggctgatgcgcaggcgctcnggccagcaggccaacnagcagcttgctgtanggagcggttctgcgcgccgccgantcttgccgatgctgtgaggctgcagaacgcgcacggctcgctggaancnncgaagcaattgaagcttggtccgggaccacgttgcaccgcgatgtactgggggggcttgcggtggcctgcgccantgcttgggtgagctcggagan

SEQ ID NO: 1130 - DNA, 561 bp, Artificial Sequence
  Description of Artificial sequences:primer
  misc_feature (1)..(561): macrophage migration inhibitory factor (glycosylation-inhibiting factor)(MIF) gene.
accacagtggtgtccgagaagtcaggcacgtagctcagcggcggccgcggcgcgtgcgtctgtgcctctgcgcgggtctcctggtccttctgccatcatgccgatgttcatcgtaaacaccaacgtgccccgcgcctccgtgccggacgggttcctctccgagctcacccagcagctggcgcaggccaccggcaagcccccccagtacatcgcggtgcacgtggtcccggaccagctcatggccttcggcggctccagcgagccgtgcgcgctctgcagcctgcacagcatcggcaagatcggcggcgcgcagaaccgctcctacagcaagctgctgtgcggcctgctggccgagcgcctgcgcatcagcccggacagggtctacatcaactattacgacatgaacgcggccaatgtgggctggaacaactccaccttcgcctaagagccgcagggacccacgctgtctgcgctggctccacccgggaacccgccgcacgctgtgttctaggcccgcccaccccaaccttctggtggggagaaataaacggtttagagact

SEQ ID NO: 1131 - DNA, 252 bp, Artificial Sequence
  Description of Artificial sequences:primer
  misc_feature (1)..(252): 3' terminal sequence from clone image:488316. latent transforming growth factor beta binding protein 1(LTBP1) gene.
  misc_feature (234)..(234): n is a, c, g, or t
  misc_feature (236)..(237): n is a, c, g, or t
  misc_feature (239)..(239): n is a, c, g, or t
  misc_feature (247)..(247): n is a, c, g, or t
tttttttttttttttaaatgccaaatttaatcaagcaatagtaaaaaaacaaaacaacataataatacaaccttctgtttaaaataacagcactgttccacctctcttccattgaattttacatatgaacagactatatatactggttttttagagaaatgtccatttggtctgccacacctatcgggctcatcctaaatcctctcattgtcttcagaggacttgcaactccangnngnttccgganttcca

SEQ ID NO: 1132 - DNA, 444 bp, Artificial Sequence
  Description of Artificial sequences:primer
  misc_feature (1)..(444): 5' terminal sequence from clone image:488316. latent transforming growth factor beta binding protein 1(LTBP1) gene.
  misc_feature (289)..(289): n is a, c, g, or t
  misc_feature (423)..(423): n is a, c, g, or t
attcggcacaggctgaggaatgcggcatcctcaatggatgtgaaaatggtcgctgtgtgagggtccaggaaggttacacctgcgattgctttgatgggtatcacttggatacggccaagatgacctgtgtcgatgtaaatgaatgcgatgagttgaacaaccggatgtctctctgcaagaatgccaagtgcattaacaccgatggttcctacaagtgtttgtgtctgccaggctacgtgccttctgacaagccaaactactgcactccgttgaataccgccttgaattntagagaaagacagtgacctggagtgaaacagaatctacataacctaagcccatatactctgcactgtgtaaaggaaaagggagaaatgtattatacttgagacattgcacctacccggaagctggaaatacggnaacagcatggagtgcaagtcc

SEQ ID NO: 1133 - DNA, 5075 bp, Artificial Sequence
  Description of Artificial sequences:primer
  misc_feature (1)..(5075): latent transforming growth factor beta binding protein 1(LTBP1) gene.
tgaattcggcacgaggtgggctctctcttttcccctcttgctcctttcttttctttttttctgtttttttaaaccttccaaggcaagttcatggatactaagctgatgtgtttgttgttctttttctccctgcctccgctcctagtgagtaaccacactggccgcatcaaggtggtctttactccgagcatctgtaaagtgacctgcaccaagggcagctgtcagaacagctgtgagaaggggaacaccaccactctcattagtgagaatggtcatgctgccgacaccctgacggccacgaacttccgagtggtaatttgccatcttccatgtatgaatggtggccagtgcagttcaagggacaaatgtcagtgccctccaaatttcacaggaaaactttgtcagatcccagtccatggtgccagcgtgcctaaactttatcagcattcccagcagccaggcaaggcgttggggacgcatgtcatccattcaacacataccttgcctctgaccgtgactagccagcaaggagtcaaagtgaaatttcctcctaacatagtcaatatccatgtgaaacatcctcctgaagcttccgtccagatacatcaggtttcaagaattgatggcccaacaggccagaagacaaaagaagctcaaccaggccaatcccaagtctcgtaccaagggcttcctgtccagaagacccagaccatacattccacatactcccaccagcaggtcattcctcacgtctaccccgtggctgctaagacacagcttggccggtgcttccaggaaaccattgggtcacagtgtggcaaagcgctccctggcctttcaaagcaagaggactgctgtggaactgtgggtacctcctggggctttaacaaatgccagaaatgccccaagaaaccatcttatcatggatacaaccaaatgatggaatgcctaccgggttataagcgggttaacaacaccttttgccaagatattaatgaatgtcagctacaaggtgtatgccctaatggtgagtgtttgaataccatgggcagctatcgatgtacctgcaaaataggatttgggccggatcctaccttttcaagttgtgttcctgatccccctgtgatctcggaagagaaagggccctgttaccgacttgtcagttctggaagacagtgtatgtaccctctgtctgttcacctcaccaagcagctctgctgttgtagtgtgggcaaggctgggccacactgtgagaaatgtccccttccaggcacagctgcttttaaggaaatctgtcctggtggaatgggttatacggtttctggcgttcatagacgcaggccaatccatcaccatgtaggtaaaggacctgtatttgtcaagccaaagaacactcaacctgttgctaaaagtactcatcctccacctctcccagccaaggaagagccagtggaggccctgaccttctcccgggaacacggggccaggagtgcggagccagaagtggcaactgcaccccctgaaaaggaaataccttcattggatcaagagaaaaccaaacttgagcctggtcaaccccagctgtctccaggcatttccgctattcatctgcatccacagtttccagtagtgattgaaaaaacatcacctcctgtgcctgttgaagtagctcctgaagcttctacgtctagtgccagccaagtgattgctcctactcaagtgacagaaatcaatgaatgtactgtgaaccctgatatctgtggagcaggacactgcattaacctaccagtgagatatacctgtatatgctacgagggctacaggttcagtgaacaacagaggaaatgtgtggatattgatgagtgtactcaggtccaacacctctgctcccagggccgctgtgaaaacaccgagggaagtttcttgtgcatttgcccagcaggatttatggccagtgaggagggtactaactgcatagatgttgacgaatgcctgaggccggacgtctgtggggaggggcactgtgtcaatactgtgggggccttccggtgtgaatactgtgacagcgggtaccgcatgactcagagaggccgttgtgaggatattgatgaatgtttgaatccaagcacttgtccagatgagcagtgtgtgaattctcctggatcttaccagtgcgttccctgcacagaaggattccgaggctggaatggacagtgccttgatgtggacgagtgcctggaaccaaacgtctgcgcaaatggtgattgttccaaccttgaaggctcctacatgtgttcatgccacaaaggctatacccggactccggaccacaagcactgtagagatattgatgaatgtcagcaagggaatctatgtgtaaacgggcagtgcaaaaataccgagggctccttcaggtgcacctgtggacaggggtaccagctgtcggcagctaaagaccagtgtgaagacattgatgaatgccagcaccgtcatctctgtgctcatgggcagtgcaggaacactgagggctcttttcaatgtgtgtgtgaccagggttacagagcatctgggcttggagaccactgtgaagatatcaatgaatgcttggaggacaagagtgtttgccagagaggagactgcattaatactgcagggtcctatgattgtacttgtccggatggatttcagctagatgacaataaaacatgtcaagatattaatgaatgtgaacatccagggctctgtggtccgcaaggggagtgcctaaacacagagggttctttccattgtgtctgccagcagggtttctcaatctctgcagatggccgtacgtgtgaagatattgatgaatgtgtaaacaacactgtttgtgacagtcacgggttttgtgacaatacagctggctccttccgctgcctctgttatcagggctttcaagccccacaggatgggcaagggtgtgtggatgtgaatgaatgtgaactgctcagtggggtgtgtggtgaagccttctgtgaaaacgtggaagggtccttcctgtgcgtgtgtgctgatgaaaaccaagagtacagccccatgactgggcagtgccgctcccggacctccacagatttagatgtagatgtagatcaacccaaagaagaaaagaaagaatgctactataatctcaatgacgccagtctctgtgataatgtgttggcccccaatgtcacgaaacaagaatgctgctgtacatcaggcgcgggatggggagataactgcgaaatcttcccctgcccggtcttgggaactgctgagttcactgaaatgtgtcccaaagggaaaggttttgtgcctgctggagaatcatcttctgaagctggtggtgagaactataaagatgcagatgaatgcctactttttggacaagaaatctgcaaaaatggtttctgtttgaacactcggcctgggtatgaatgctactgtaagcaagggacgtactatgatcctgtgaaactgcagtgctttgatatggatgaatgtcaagaccccagtagttgtattgatggccagtgtgttaatacagagggctcttacaactgcttctgtactcaccccatggtcctggatgcgtcagaaaaaagatgtatacgaccggctgagtcaaacgaacaaatagaagaaactgatgtctaccaagatttgtgctgggaacatctgagtgatgaatacgtgtgtagccggcctcttgtgggcaagcagacaacgtacactgagtgctgctgtctgtatggagaggcctggggcatgcagtgtgccctctgccccctgaaggattcagatgactatgctcagctgtgtaacatccccgtgacgggacgccggcagccatatggacgggacgccttggttgacttcagtgaacagtatactccagaagccgatccctacttcatccaagaccgttttctaaatagctttgaggagttacaggctgaggaatgcggcatcctcaatggatgtgaaaatggtcgctgtgtgagggtccaggaaggttacacctgcgattgcttggatgggtatcacttggatactgccaagatgacctgtttcgatgtaaatgaatgcgatgagttgaacaaccggatgtctctctgcaagaatgccaagtgcattaacaccgatggttcctacaagtgtttgtgtctgccaggctacgtgccttctgacaagccaaactactgcactccgttgaataccgccttgaatttagagaaagacagtgacctggagtgaaacagaatctacataacctaagcccatatactctgcactgtgtaaaggaaaagggagaaatgtattatacttgagacattgcacctaccccggaaggctggaaatacagaaacagcatggagttgcaagtcctctgaagacaatgagaggatttaggatgagcccgataggtgtggcagaccaaatggacatttctctaaaaaaccagtatatatagtctgttcatatgtaaaattcaatggaagagaggtggaacagtgctgttattttaaacagaaggttgtattattatgttgttttgttttttttactattgcttgattaaatttggcatttaaatagtggtggaaatatttttatataattttcattttttggttgtgcagttccttggctactgtttttcttttacttcagttttttaaaaatctcaaatgaaaaagtcttcgatacaatattgttaagctgtattataagtattgttacacagggttatgcaattcccggcctggagcatttttgaaattcaaattgtctgtcctgtggagcaggcagtgattttgttccaaaactttgtatacacatttggagaaaagtactttatattttcagtgttttgtctgattttaatgtccgttcttagccaagctgctagcaggtgttaattggatccctttccttcactgaaatggaagagtttataagcttacgttagtattgtaatatgtaaagtaagcccaacaaaaatttttaaaaatttgatgatccccaatatatctaccattgtatgttaaataaat

SEQ ID NO: 1134 - DNA, 437 bp, Artificial Sequence
  Description of Artificial sequences:primer
  misc_feature (1)..(437): 3' terminal sequence from clone image:488412. zinc finger protein 354a(ZNF354A) gene.
  misc_feature (295)..(295): n is a, c, g, or t
  misc_feature (374)..(374): n is a, c, g, or t
  misc_feature (424)..(424): n is a, c, g, or t
ttttttttttttttttttttttttagttcataattcatttttcttttattttggtccttttctctaaaaaggtacaatttgatcaattcatttgtatgctattaaaatgctataaaaatattaccagtttggtggtcttctaatgagaaatctaaagcacacctccccacccactcggatatctgtttctgatgatcacgtgacatctagcatatacgtctgtaggaaaagggaaaaagcaaacccatttcacaaatggctaaagtcaatgtcttcaattgtaaattcttcatcncaggttatttttttaagtgtctgacaggcacaaacactttcctcattatctattatatagctgaggtttatccatgggnattaaatacccaatgggggggctaaattattaccggttttttcccatccnttacatttaatac

SEQ ID NO: 1135 - DNA, 561 bp, Artificial Sequence
  Description of Artificial sequences:primer
  misc_feature (1)..(561): 5' terminal sequence from clone image:488412. zinc finger protein 354a(ZNF354A) gene.
  misc_feature (32)..(32): n is a, c, g, or t
  misc_feature (498)..(498): n is a, c, g, or t
gaaaaaccatgtaaatgtaaagtatgtggaanagccttcagacagagttccgctctcattcaacatcagagaatgcatactggagaaagaccctataaatgtaacgagtgtgggaaaacattcaggtgtaactcatcacttagtaatcaccagagaattcatactggagagaaaccatatcgatgtgaggaatgtgggatatcttttggccaaagttcagctcttattcagcatcgaaggattcatacaggagaaaaaccctttaaaatgtaatacatgtggaaaaacttttagacaaaagctcatcaccgtattgcacatcagagaattccatactggagagaaaccctatgaattgtaatacatgtggggaaacttttcaaccataggtcatcccttactaatcattataaaaattcatatcgaagagggaccccctagaaagtagatttgtatgtgtgaaagccttaaaccaaagctcatcgaagaatacatccntggagagagatggtaataaatgtaatggatgtggaaaaaactgtaatattttagccccccatt

SEQ ID NO: 1136 - DNA, 2435 bp, Artificial Sequence
  Description of Artificial sequences:primer
  misc_feature (1)..(2435): zinc finger protein 354a(ZNF354A) gene.
cgccgtcggggcggagcggtgtcgcgaggctgcatcccggccggcggttccggagcctcgcgtctggggaggcgcggcccgggacgctcgagcttagggagatctgccttctggagactgcgccgtcctcccgggagagccagaaagaggacatggctgctgggcagcgggaagcgaggccccaggtgtcactgacgtttgaggatgtggctgtgctgtttacccgagatgagtggagaaagctggccccttctcagagaaacttgtaccgggatgtgatgctggagaactataggaacctggtctcactggggctcccatttaccaaaccaaaagtgatctccctgttgcagcaaggagaagatccctgggaggtggagaaagacggttctggcgtctcctctctaggatcgaagagcagtcataaaaccacaaagtcaacgcaaacacaagactcttcatttcagggactgatactgaaaagatccaacaggaatgtaccttgggatttgaaattagaaaagccttacatatatgaaggcagattagagaaaaagcaggataaaaagggaagttttcagatagtttcagccacccacaaaaaaatccccactatagaaagaagccataaaaatactgaattgagccaaaacttcagcccaaagtcagtgcttattaggcaacagatacttcccagagaaaaaacaccaccaaaatgtgaaatacaaggaaacagcctcaaacagaattcacaattacttaatcaaccaaaaattacagcagataaacgctataaatgtagtctgtgtgaaaaaaccttcattaacacttcatcccttcgtaaacatgagaaaaaccatagtggagagaaactatttaagtgtaaagaatgttcaaaagcctttagccaaagttcagctcttattcaacatcaaataacacatactggagagaaaccctacatatgtaaagaatgtgggaaagcctttactctcagtacatccctttataaacatctaagaacccatactgtggagaaatcctacagatgtaaagaatgtggtaaatccttcagccgaaggtcaggcctttttatacatcaaaaaattcatgctgaagaaaacccttgtaagtataatccgggtaggaaggcatctagttgcagcacatccctttctggatgtcaaagaattcattctagaaagaagtcctacttatgtaatgaatgtggcaacacctttaagtctagctcatcccttcgttatcatcagagaattcacactggagagaagccttttaaatgtagtgaatgtgggagagccttcagccagagtgcctctcttattcaacatgaaagaattcacaccggagaaaagccctatagatgcaatgaatgtgggaaaggctttacttctatttcacgacttaatagacaccgaatcattcatactggagagaagtattataattgtaatgaatgtggtaaagccttaagctcccactcaacacttattattcacgagcgaattcatactggagaaaaaccatgtaaatgtaaagtatgtggaaaagccttcagacagagttcagctctcattcaacatcagagaatgcatactggagaaagaccctataaatgtaacgagtgtgggaaaacattcaggtgtaactcatcacttagtaatcaccagagaattcatactggagagaaaccatatcgatgtgaggaatgtgggatatcttttggccaaagttcagctcttattcagcatcgaaggattcatacaggagaaaaaccctttaaatgtaatacatgtggaaaaacttttagacaaagctcatcacgtattgcacatcagagaattcatactggagagaaaccctatgaatgtaatacatgtgggaaacttttcaaccataggtcatcccttactaatcattataaaattcatatcgaagaggacccctagaaagtagatttgtatgtgtgaaagccttaaaccaaagctcatcgaagaatacatccttgagagagatgtaataaatgtaatggatgtgaaaaaaactgtaataatttagccctcattaggtatttaatcccatggataaacctcagctatataatagatatgaggaaagtgtttgtgcctgtcagacacttaaaaaaataacctgagatgaagaatttacaattgaagacattgactttagccatttgtgaaatgggtttgctttttcccttttcctacagacgtatatgctagatgtcacgtgatcatcagaaacagatatccgagtgggtggggaggtgtgctttagatttctcattagaagaccaccaaactggtaatatttttatagcattttaatagcttgatcaaattgtacctttttagagaaaaggaccaaaataaaagaaaaatgaattatgaact

SEQ ID NO: 1137 - DNA, 433 bp, Artificial Sequence
  Description of Artificial sequences:primer
  misc_feature (1)..(433): 3' terminal sequence from clone image:488430. transducin-like enhancer of split 2 (e(sp1) homolog, drosophila)(TLE2) gene.
  misc_feature (81)..(81): n is a, c, g, or t
  misc_feature (236)..(236): n is a, c, g, or t
gtgatagatacattttatttccaccgaggtcccctgcccatcggcccccacatgcagcaggggaaggtgtgaagccgttgncagagagcagatgggatgtacggttcctaggcagggctgggaggcggctgctaggatgtctgtcctggctgctgattcccctgggagtctggacttcgggtacaggaaggggggtcatgtctcagtagaccacctcatacacggtggccttcttntcccccgagcctgtcacgatgtatttgttatttctggagatgtcacaactcaggactgaggacgactccttggactggaaaatgctggccccgtacggcgtcctccaggcgttgagcaggttgtccttcccggtgctcacaaaccaccgtccgcaggaggcaaacttcagggacagcacgcagctctcgtggaggtt

SEQ ID NO: 1138 - DNA, 360 bp, Artificial Sequence
  Description of Artificial sequences:primer
  misc_feature (1)..(360): 5' terminal sequence from clone image:488430. transducin-like enhancer of split 2 (e(sp1) homolog, drosophila)(TLE2) gene.
  misc_feature (303)..(303): n is a, c, g, or t
  misc_feature (313)..(313): n is a, c, g, or t
  misc_feature (321)..(321): n is a, c, g, or t
  misc_feature (326)..(326): n is a, c, g, or t
  misc_feature (332)..(332): n is a, c, g, or t
  misc_feature (348)..(348): n is a, c, g, or t
  misc_feature (354)..(354): n is a, c, g, or t
ggttcctgcaagttgctgccggatggcggagtctgatcgtgggcggtgaggcagcaccttgtccatttgggacctggcggcgccaccccccgtatcaaggccgagctgacttcctcagccccagcctgctacgccctggccgtcagccccgacgccaaggtttgcttctcctgctgcagcgatggcaacattgtggtctgggacctgcagaatcagactatggtcaggcagttccagggccacacggacggcgccactgcattgatatttccgattacggcactcggctctggacaagggggncttgaccaanacgggttngcttnttgggnacttcgggaaggggcnccaagnttggaa

SEQ ID NO: 1139 - DNA, 2588 bp, Artificial Sequence
  Description of Artificial sequences:primer
  misc_feature (1)..(2588): transducin-like enhancer of split 2 (e(sp1) homolog, drosophila)(TLE2) gene.
ggcacgaggctctctcctccctctttcttcgggcagcctccccaccaccccacttcagcctcccccactcttgccgcctccatatcatcaagctctggtggcgcctggggggcttttcggatcggcaggatgtacccccagggaaggcacccgaccccgctccagtccggccagcccttcaagttctcgatcttggagatctgcgaccgcatcaaagaagaattccagtttcttcaggctcaataccacagcctcaagctagaatgtgagaagctggccagcgagaagacggaaatgcagcgacattatgtcatgtattatgagatgtcgtacgggctcaacattgaaatgcataagcaggcggagattgtgaagcgtctgagcggtatctgcgctcagattatccccttcctgacccaggagcatcagcagcaggtgctccaggccgtagaacgcgccaagcaggtcaccgtgggggagctgaacagcctcatcgggcagcagctccagccgctgtcccaccacgcaccccctgtgcccctcaccccccgcccagccgggctggtgggcggcagtgctacggggctgcttgctctgtctggagccctggctgcccaggctcagctggcggcggctgtcaaggaggaccgtgcgggcgtggaggccgaggggtccagagtggagagagccccgagcaggagtgcatctccctcgccccctgagagtctcgtggaggaggagcgaccgagtggccctggtggtggcgggaagcagagagcagatgagaaggagccatcaggaccttatgaaagcgacgaagacaagagtgattacaatctggtggtggacgaggaccaaccctcagagccccccagcccggctaccaccccctgcggaaaggtacccatctgcattcctgcccgtcgggacctggtggacagtccagcctccttggcctctagccttggctcaccgctgcctagagccaaggagctcatcctgaatgaccttcccgccagcactcctgcctccaaatcctgtgactcctccccgccccaggacgcttccacccccgggcccagctcggccagtcacctctgccagcttgctgccaagccagcaccttccacggacagcgtcgccctgaggagccccctgactctgtccagtcccttcaccacgtccttcagcctgggctcccacagcactctcaacggagacctctccgtgcccagctcctacgtcagcctccacctgtccccccaggtcagcagctctgtggtgtacggacgctcccccgtgatggcatttgagtctcatccccatctccgagggtcatccgtctcttcctccctacccagcatccctgggggaaagccggcctactccttccacgtgtctgcggacgggcagatgcagccggttcccttcccctcggatgcactggtaggcgcgggcatcccgcggcacgcccggcagctgcacacgctggcccatggcgaggtggtctgcgcggtcaccatcagcggctccacacagcatgtgtacacgggcggcaagggctgtgtgaaggtgtgggacgtgggccagcctggggccaagacgcccgtggcccagctcgactgcctgaaccgagacaactacattcgttcctgcaagttgctgccggatggccggagtctgatcgtgggcggtgaggccagcaccttgtccatttgggacctggcggcgcccaccccccgtatcaaggccgagctgacttcctcagccccagcctgctacgccctggccgtcagccccgacgccaaggtttgcttctcctgctgcagcgatggcaacattgtggtctgggacctgcagaatcagactatggtcaggcagttccagggccacacggacggcgccagctgcattgatatttccgattacggcactcggctctggacagggggcctggacaacacggtgcgctgctgggacctgcgggagggccgccagctgcagcagcatgacttcagctcccagattttctccctgggccactgccctaaccaggactggctggcggtcggaatggagagtagcaacgtggagatcctgcacgtccgcaagccggagaaataccagctgcacctccacgagagctgcgtgctgtccctgaagtttgcctcctgcggacggtggtttgtgagcaccgggaaggacaacctgctcaacgcctggaggacgccgtacggggccagcattttccagtccaaggagtcgtcctcagtcctgagttgtgacatctccagaaataacaaatacatcgtgacaggctcgggggacaagaaggccaccgtgtatgaggtggtctactgagacatgaccccccttcctgtacccgaagtccagactcccaggggaatcagcagccaggacagacatcctagcagccgcctcccagccctgcctaggaaccgtacatcccatctgctctctggccaacggcttcacaccttcccctgctgcatgtgggggccgatgggcaggggacctcggtggaaataaaatgtatctatcacatccgcaaaaaaaaaaaaaaaaaa

SEQ ID NO: 1140 - DNA, 372 bp, Artificial Sequence
  Description of Artificial sequences:primer
  misc_feature (1)..(372): 3' terminal sequence from clone image:488526. myosin, heavy polypeptide 11, smooth muscle(MYH11) gene.
  misc_feature (266)..(266): n is a, c, g, or t
atttggacaaccagcggcaactcgtgtccaacctggaaaagaagcagaggaaatttgatcagttgttagccgaggagaaaaacatctcttccaaatacgcggatgagagggacagagctgaggcagaagccagggagaaggaaaccaaggccctgtccctggctcgggcccttgaagaggccttggaagccaaagaggaactcgagcggaccaacaaaatgctcaaagccgaaatggaagacctggtcagctccaaggatgacgtngggcaagaacgtccatgagctggagaagtccaagcgggccctggagacccagatgggaggagatgaagacgcagctggaagagctggaggacgagctgcaagccac

SEQ ID NO: 1141 - DNA, 476 bp, Artificial Sequence
  Description of Artificial sequences:primer
  misc_feature (1)..(476): 5' terminal sequence from clone image:488526. myosin, heavy polypeptide 11, smooth muscle(MYH11) gene.
  misc_feature (131)..(131): n is a, c, g, or t
  misc_feature (446)..(446): n is a, c, g, or t
gagatagcatctcactcttgtcgcacaggctggagtgcaatggcatgatctcggatcactgcaacctctgcctcctgggttcaagcgattctcctgcctcaggctcctgagtagctgggactcctcctctncctcctccagctgcctcttgagctgcttgaccctggcattgctttctctgcctgctccttgtactgctcggccatcttgcgctcgtcctccacctgcagcaagatttccttcagcttcttgtctttctgcttcagcgacttggtggccgcctgtttctctctggcctcctgctcgacctgctcctccaagcttgtgcaatcttggcctccaagcgccgcgaatggtggacttgaacttggacttgacggccccctccatctcgtggagcttgctcggaagctccttgttctgccgctcgagctgctgccgggcantctcattcttctgggccgtgctgcgctctg

SEQ ID NO: 1142 - DNA, 6900 bp, Artificial Sequence
  Description of Artificial sequences:primer
  misc_feature (1)..(6900): myosin, heavy polypeptide 11, smooth muscle(MYH11) gene.
gcctgggaggtgcgtcagatccgagctcgccatccagtttcctctccactagtccccccagttggagatctgggaccaacaaggcaccatggcgcagaagggccaactcagtgacgatgagaagttcctctttgtggacaaaaacttcatcaacagcccagtggcccaggctgactgggccgccaagagactcgtctgggtcccctcggagaagcagggcttcgaggcagccagcattaaggaggagaagggggatgaggtggttgtggagctggtggagaatggcaagaaggtcacggttgggaaagatgacatccagaagatgaacccacccaagttctccaaggtggaggacatggcggagctgacgtgcctcaacgaagcctccgtgctacacaacctgagggagcggtacttctcagggctaatatatacgtactctggcctcttctgcgtggtggtcaacccctataaacacctgcccatctactcggagaagatcgtcgacatgtacaagggcaagaagaggcacgagatgccgcctcacatctacgccatcgcagacacggcctaccggagcatgcttcaagatcgggaggaccagtccattctatgcacaggcgagtctggagccgggaaaaccgaaaacaccaagaaggtcattcagtacctggccgtggtggcctcctcccacaagggcaagaaagacacaagtatcacgggagagctggaaaagcagcttctacaagcaaacccgattctggaggctttcggcaacgccaaaacagtgaagaacgacaactcctcacgattcggcaaattcatccgcatcaacttcgacgtcacgggttacatcgtgggagccaacattgagacctatctgctagaaaaatcacgggcaattcgccaagccagagacgagaggacattccacatcttttactacatgattgctggagccaaggagaagatgagaagtgacttgcttttggagggcttcaacaactacaccttcctctccaatggctttgtgcccatcccagcagcccaggatgatgagatgttccaggaaaccgtggaggccatggcaatcatgggtttcagcgaggaggagcagctatccatattgaaggtggtatcatcggtcctgcagcttggaaatatcgtcttcaagaaggaaagaaacacagaccaggcgtccatgccagataacacagctgctcagaaagtttgccacctcatgggaattaatgtgacagatttcaccagatccatcctcactcctcgtatcaaggttgggcgagatgtggtacagaaagctcagacaaaagaacaggctgactttgctgtagaggctttggccaaggcaacatatgagcgccttttccgctggatactcacccgcgtgaacaaagccctggacaagacccatcggcaaggggcttccttcctggggatcctggatatagctggatttgagatctttgaggtgaactccttcgagcagctgtgcatcaactacaccaacgagaagctgcagcagctcttcaaccacaccatgttcatcctggagcaggaggagtaccagcgcgagggcatcgagtggaacttcatcgactttgggctggacctacagccctgcatcgagctcatcgagcgaccgaacaaccctccaggtgtgctggccctgctggacgaggaatgctggttccccaaagccacggacaagtctttcgtggagaagctgtgcacggagcagggcagccaccccaagttccagaagcccaagcagctcaaggacaagactgagttctccatcatccattatgctgggaaggtggactataatgcgagtgcctggctgaccaagaatatggacccgctgaatgacaacgtgacttccctgctcaatgcctcctccgacaagtttgtggccgacctgtggaaggacgtggaccgcatcgtgggcctggaccagatggccaagatgacggagagctcgctgcccagcgcctccaagaccaagaagggcatgttccgcacagtggggcagctgtacaaggagcagctgggcaagctgatgaccacgctacgcaacaccacgcccaacttcgtgcgctgcatcatccccaaccacgagaagaggtccggcaagctggatgcgttcctggtgctggagcagctgcggtgcaatggggtgctggaaggcattcgcatctgccggcagggcttccccaaccggatcgtcttccaggagttccgccaacgctacgagatcctggcggcgaatgccatccccaaaggcttcatggacgggaagcaggcctgcattctcatgatcaaagccctggaacttgaccccaacttatacaggatagggcagagcaaaatcttcttccgaactggcgtcctggcccacctagaggaggagcgagatttgaagatcaccgatgtcatcatggccttccaggcgatgtgtcgtggctacttggccagaaaggcttttgccaagaggcagcagcagctgaccgccatgaaggtgattcagaggaactgcgccgcctacctcaagctgcggaactggcagtggtggaggcttttcaccaaagtgaagccactgctgcaggtgacacggcaggaggaggagatgcaggccaaggaggatgaactgcagaagaccaaggagcggcagcagaaggcagagaatgagcttaaggagctggaacagaagcactcgcagctgaccgaggagaagaacctgctacaggaacagctgcaggcagagacagagctgtatgcagaggctgaggagatgcgggtgcggctggcggccaagaagcaggagctggaggagatactgcatgagatggaggcccgcctggaggaggaggaagacaggggccagcagctacaggctgaaaggaagaagatggcccagcagatgctggaccttgaagaacagctggaggaggaggaagctgccaggcagaagctgcaacttgagaaggtcacggctgaggccaagatcaagaaactggaggatgagatcctggtcatggatgatcagaacaataaactatcaaaagaacgaaaactccttgaggagaggattagtgacttaacgacaaatcttgcagaagaggaagaaaaggccaagaatcttaccaagctgaaaaacaagcatgaatctatgatttcagaactggaagtgcggctaaagaaggaagagaagagccgacaggagctggagaagctgaaacggaagctggagggtgatgccagcgacttccacgagcagatcgctgacctccaggcgcagatcgcagagctcaagatgcagctggccaagaaggaggaggagctgcaggcggccctggccaggcttgacgatgaaatcgctcagaagaacaatgccctgaagaagatccgggagctggagggccacatctcagacctccaggaggacctggactcagagcgggccgccaggaacaaggctgaaaagcagaagcgagacctcggcgaggagctggaggccctaaagacagagctggaagacacactggacagcacagccactcagcaggagctcagggccaagagggagcaggaggtgacggtgctgaagaaggccctggatgaagagacgcggtcccatgaggctcaggtccaggagatgaggcagaaacacgcacaggcggtggaggagctcacagagcagcttgagcagttcaagagggccaaggcgaacctagacaagaataagcagacgctggagaaagagaacgcagacctggccggggagctgcgggtcctgggccaggccaagcaggaggtggaacataagaagaagaagctggaggcgcaggtgcaggagctgcagtccaagtgcagcgatggggagcgggcccgggcggagctcaatgacaaagtccacaagctgcagaatgaagttgagagcgtcacagggatgcttaacgaggccgaggggaaggccattaagctggccaaggacgtggcgtccctcagttcccagctccaggacacccaggagctgcttcaagaagaaacccggcagaagctcaacgtgtctacgaagctgcgccagctggaggaggagcggaacagcctgcaagaccagctggacgaggagatggaggccaagcagaacctggagcgccacatctccactctcaacatccagctctccgactcgaagaagaagctgcaggactttgccagcaccgtggaagctctggaagaggggaagaagaggttccagaaggagatcgagaacctcacccagcagtacgaggagaaggcggccgcttatgataaactggaaaagaccaagaacaggcttcagcaggagctggacgacctggttgttgatttggacaaccagcggcaactcgtgtccaacctggaaaagaagcagaggaaatttgatcagttgttagccgaggagaaaaacatctcttccaaatacgcggatgagagggacagagctgaggcagaagccagggagaaggaaaccaaggccctgtccctggctcgggcccttgaagaggccttggaagccaaagaggaactcgagcggaccaacaaaatgctcaaagccgaaatggaagacctggtcagctccaaggatgacgtgggcaagaacgtccatgagctggagaagtccaagcgggccctggagacccagatggaggagatgaagacgcagctggaagagctggaggacgagctgcaagccacggaggacgccaaactgcggctggaagtcaacatgcaggcgctcaagggccagttcgaaagggatctccaagcccgggacgagcagaatgaggagaagaggaggcaactgcagagacagcttcacgagtatgagacggaactggaagacgagcgaaagcaacgtgccctggcagctgcagcaaagaagaagctggaaggggacctgaaagacctggagcttcaggccgactctgccatcaaggggagggaggaagccatcaagcagctacgcaaactgcaggctcagatgaaggactttcaaagagagctggaagatgcccgtgcctccagagatgagatctttgccacagccaaagagaatgagaagaaagccaagagcttggaagcagacctcatgcagctacaagaggacctcgccgccgctgagagggctcgcaaacaagcggacctcgagaaggaggaactggcagaggagctggccagtagcctgtcgggaaggaacgcactccaggacgagaagcgccgcctggaggcccggatcgcccagctggaggaggagctggaggaggagcagggcaacatggaggccatgagcgaccgggtccgcaaagccacacagcaggccgagcagctcagcaacgagctggccacagagcgcagcacggcccagaagaatgagagtgcccggcagcagctcgagcggcagaacaaggagctccggagcaagctccacgagatggagggggccgtcaagtccaagttcaagtccaccatcgcggcgctggaggccaagattgcacagctggaggagcaggtcgagcaggaggccagagagaaacaggcggccaccaagtcgctgaagcagaaagacaagaagctgaaggaaatcttgctgcaggtggaggacgagcgcaagatggccgagcagtacaaggagcaggcagagaaaggcaatgccagggtcaagcagctcaagaggcagctggaggaggcagaggaggagtcccagcgcatcaacgccaaccgcaggaagctgcagcgggagctggatgaggccacggagagcaacgaggccatgggccgcgaggtgaacgcactcaagagcaagctcagagggccccccccacaggaaacttcgcagtgatgcaccaggcgaggaaacgagacctctttcgttccttctagaaggtctggaggacgtagagttattgaaaatgcagatggttctgaggaggaaacggacactcgagacgcagacttcaatggaaccaaggccagtgaataagcaactttctacagttttgcaccacggcaagaaaaccaaaaaccaaaacaaacaaacaaaaaaaacccaacaacaacccagaacaaagcaaaacccagcagactgtacttagcattgtctaaatccattctcaaattccaaatatcacagacacccctcacacaaggaatataaaaaccaccaccctccagcctgggcaacgtagtaaaacctcatctatacaagaatttaaaaataagctgggcgtggtggtacacacctgtggtcccagctactagggaggctgagccaggaagaacgctccagcccaggacttcgaggctgcaatgagctataattgcatcattgcactccagcctgggcaacagagaccctgtctcaaccaccaccaccaccaccacccctactacccctgtattcaaggtaaaaattgaagtttgtatgatgtaagagatgagaaaaacccaacaggaaacacagacacatcctccagttctatcaatggattgtgcagacactgagtttttagaaaaacatatccacggtaaccggtccctggcaattctgtttacatgaaatggggagaaagtcaccgaaatgggtgccgccggcccccactcccaattcattccctaacctgcaaacctttccaacttctcacgtcaggcctttgagaattctttccccctctcctggtttccacacctcagacacgcacagttcaccaagtgccttctgtagtcacatgaattgaaaaggagacgctgctcccacggaggggagcaggaatgctgcactgtttacaccctgactgtgcttaaaaacactttcactaataaatggttataaatcac

SEQ ID NO: 1143 - DNA, 339 bp, Artificial Sequence
  Description of Artificial sequences:primer
  misc_feature (1)..(339): 3' terminal sequence from clone image:488875. phosphatidylinositol-4-phosphate 5-kinase, type i, alpha(PIP5K1A) gene.
ttttttttttctaaataactcattaaagtttattacattaaaaccatatatcacttttatattgtatttgccatttctgaacaatacaaagtagaggcaaatagtaacacttaataaaaatgttgcttccccattcctttccctaagacccagccctccctcaaatattccctcccacccctaacagaactctgtccttaataaaacacttaaatacatcataaatagtaaattatgaaaaaaaaatagcaagaattctttccttcttgtaaaaaacatggcagcaaagacaggcagccagaaactggtgggggtgtctaatatagacagttatttggg

SEQ ID NO: 1144 - DNA, 204 bp, Artificial Sequence
  Description of Artificial sequences:primer
  misc_feature (1)..(204): 5' terminal sequence from clone image:488875. phosphatidylinositol-4-phosphate 5-kinase, type i, alpha(PIP5K1A) gene.
ccagaagtgttgacaagatgcctattcgtagagttccctcagaagagccatggtgtttatgaagagaagagtagtgattgctctgccagaagcagctcctctttaaactcctcctctcttgatgaatttcttaaggctgaaggaatgaagagagtgggacatggggtaatctttatcccttttgttaaaacaggaggcagccat

SEQ ID NO: 1145 - DNA, 4262 bp, Artificial Sequence
  Description of Artificial sequences:primer
  misc_feature (1)..(4262): phosphatidylinositol-4-phosphate 5-kinase, type i, alpha(PIP5K1A) gene.
agcggggtcgaagcggctgggttgggcggtaaacaggccgtgggtagggaggacagagaggcggcgttcgctcctctgggacttttcacgcctcgttttgttttttttcttcagatgtggctttttcctgacgcagggtccaagcagtcagcttgagcttactcttctgtgaaagcggaaagtctcctctgaggaaagcggttgaacttgtggagggcgtgcgagacgggcgttctcccccatgccaggcgaatggtgccgccttgagctggtccagcagccggctcgatgacaggtctgagggaggccccagaggcggcggggaggtggcccgcagaacgcgggttctgtaaagacacgtggagaagattcgattccgagaacaggaagaggcggatggaaagacagccgggcggctgccgggaagggggctgccaagatggcgtcggcctcctcccaaccgtcgttggcggtcggtttttcatcctttgatcccggggccccttcctgtaccgcatcctcagcatctggaatcttgagccccacggcatctgaggtgccttatgcctctggcatgcccatcaagaaaacaggccatcgaggtgtcgattcctcaggagagacaacatataaaaagacaacctcaacagccttgaaaggtgccatccagttaggcattacttacactgtggggagcctgagtaccaaaccagagcgtgatgtcctcatgcaagatttctacgtggtggagagtatcttcttccccagtgaagggagcaacctgacccctgctcatcactacaatgccttccgtttcaagacctatgcgccggttgccttccgctactttcgggagctatttggtatcccgcccgatgattacttgtgctccctctgcagtgagccgctgattgaactctgtagctctggagctagtggttccctgttctatgtgtccagcgacgatgaactcattattaagacactccaacataaagaggcggagtttctgcagaagctgcttccaggatactacttgaacctcagccagaaccctcggactttgctgcctaaattctttggactgtactgtgtgcagacaggtggcaagaacattcggattgtggtgatgaacaatcttttaccaagatccgtcaaaatgcatatcaaatatgacctcaaaggctcaacctacaaacgccgggcttcccagaaagagcgagagaagcctcttcccacatttaaagatctagacttcttacaagacatccctgatggtctttttttggatgctgacacgtacaatgctctctgtaagaccctgcagcgtgactgtttggtgctgcagagcttcaagataatggactatagcctctggctgtcaatccacaatatagatcatgcacaacgagagcccttaagcagcgacactcttcaagtgtcaatcgacactcaaagactggctccccaaaaggctctgtattccacagccatggaattcatccagggagaggctcggctgggcgacaccatggaggccgatgaccatatgggtggcatccctgctcagaatagtaaaggggaaaggcttctgctttatattggcatcattgacattctacagtcttacacgtttcttaagaagttggagcactcttggaaagccgtggtacatgatggggacgctgtctcagtgcatcgcccaggcttctacgctgaacggttccagcacttcatgtgcaacgcagtatttaagaagatccccttgaagccttctccttccaaaaagtttcggtctggcttatctttctctctgcatacgggctccagtggcaactcctgcattacttaccagccactggtctctgaggaacacaagtcacaagtgataaaggtgcaagtggagccaggtgttcaccttggtcgttctgatgttttacctcagacctcagaatccacctttggaggaaatcagtgagggctcactattactgaccacagtttctcacctgtagttggaaagactttgcatatgctaactacaagtataaccttggaaaaacttgaatgtacagagtcagagttcacccattaagcgcaaagcctcagaagacctggaacaagattctgcttctctgtgatcccaagatgtcagcccttgccccagcaatgttgaattttcttctacttggtcatcaaaaaaggagtgtaaaagaagcgaggtgcactctccatcttcttcctgaagaagagcctcctattcttctctgtcctcataaatgggcattagtgccttggacagttgaggaccactccatcctctccacagcatcccctccactccagagttgggtggcacggattttcaactggctaaccttggcttccacaactgaatttttttcagacccccattcttcatgctggaaatgagattactggacttggcagttttctttcccctcatctttcaccaggaactggactcttcatttcctcaggacagactagctgccacattatccccaccttagttctttctctctgatccctggaagaaaacccctgtaatctctgtataggtttttgggggataagggtgtttaaccacctcccaactttgttttttttttttttcctgaaaaaaggaaaaagcgcacagcaccaaatttcaagccagtttcagatcaaaaatccagaagtgttgacgagatgcctatccgtagggttccctcagaagagccacggtgtttgtgaagggaaaagtagtgattgctctgccagaagcagctcctctttaaactcctcatctcttgatgaatttcttaaggctgaaggaatggagagagtgggacgtggggtaatctttaccacttttgttaaaacatgaggcagccatgggttgggagatcatagcccttcctgggcagaatcctattcactgccaggctataatgattattactgttttgcaatttgaaatatattctggttgcttttctaaatatgaagacttaccaaatgaattttagatcattctccaaaggagatttttttgctcttcccatcttttccaacagtgttctcctgtttgtggtgctaaggtgaagaggggacacctctgtctgtttaacaggcagtccgtatctgtgaggccagcaaatattttcttaaattcatggggagacagtggattcttgcctcggtgaggtcattgctatgccatatgtcctacccccgtcttcatgcagagaagttggaaatgggggctacatatgccctctcctccccacctacaagagttgtggttttccatctgatccttccactgttgtcaggagaagaagggggcctggtatctcaggcatattgttgaattcctgttctatcccttctctatcccaccctgccttgacagtaggttagcccataccccaaataactttctatattagacacccccagccagtttctggctgcctgtctttgctgccatgttcttttttacaagaaggaaagaaacaattcttgctatttttttcataatttactatttatgatgtatttaagtgttttattaaggacagagttctgtaaggggtgggagagaatatttgagggagggctgggtcttagggaaaggaatagggaatcaacattttaatgaagtgtctctatttgcttctactttgtatcattcggaaaaggcaaatgcaatataaaagtgatatatggttttaatgtaataaacttttatcagttatttagaaaaagaaaagaaaccgatggatcattttgacaacaatgaagaaaggagacaggaacaaggaaaagttgaggttatcctgtaaagcatcttaaagcagaaagcaaggctcttagtttgtaatttaatacacctgactgtaataattgtaaaacaaggcaggagtcaaggaagggaggcagctgacgatgccatgtgtctgtcagcataaggcaaaggcagagcgaggtgaaaaggcatgaccaggaaagatgacatgcattgtcataaataaatgcagagagaaataattttttttgtgaaaacgaacggacccatatactttataaacacagggtaccacttattcttcaaactatctaaactagtcatggatgagttttcaatgtttttatatgagttctttcatgagtccaaaatactatttcttacattgtgtctttccataacttatctgccaataaagatacctgctagggcaaaaaaaaaaagaaaa

SEQ ID NO: 1146 - DNA, 442 bp, Artificial Sequence
  Description of Artificial sequences:primer
  misc_feature (1)..(442): 3' terminal sequence from clone image:488913. microfibrillar-associated protein 3(MFAP3) gene.
  misc_feature (434)..(434): n is a, c, g, or t
tttttttttttttttttgtcatcataagtgtttattatatacagttgaagcaggtggcatcatccatcatttttcttcctcttgatgtctagatcagttgtgtgtgtattttaatatagtaacacaccctcacaattatctaatcttatttcaggttagtgcttctcggaaaggctacaaaagcagccatagctcagaattacgtatctgaagtaaacaaaaataaaaacctcaacaacaaaatattaaccaaacaaacaagataaagacgcatgcaacctatagcaccatacctaagaccacaaagggcaggagggttgacagaggtcttaagaggaatccagttttgggttttctcctaaggatgagatcccaaatatagaacctatttgtagagtccaatacttttaaaaagggaaagcctgagaaattcngttaacag

SEQ ID NO: 1147 - DNA, 456 bp, Artificial Sequence
  Description of Artificial sequences:primer
  misc_feature (1)..(456): 5' terminal sequence from clone image:488913. microfibrillar-associated protein 3(MFAP3) gene.
  misc_feature (362)..(362): n is a, c, g, or t
tcggcacagggcattcttcgcaagactgagaaggccatcaatgagttctttagaactcgaaggggctgagaaacttcagaaggcctttgagattgcaaaacgtatccccatcattacctcagccaaaactctggagctcgccaaagtcacacaatttaagaccatggagtttgctcgttatattgaagaactggcaagaagtgtccctcttccacctcttattctaaactgtcgagcctttgttgaggagatgtttgaggctgtgcgacgtggatgaccctgatgacctgggtgaaacaattaaacacgagacctgccttgaatgctcaaggtggcatctatgtcagttaacccacgagatngggaccggagtaaattcaccaaggaggaagattcagatgatcggctctctgaatgaacaaggccaaggaaatagcagttcaggtttctgtccac

SEQ ID NO: 1148 - DNA, 2914 bp, Artificial Sequence
  Description of Artificial sequences:primer
  misc_feature (1)..(2914): microfibrillar-associated protein 3(MFAP3) gene.
agacggcggtcgggtaggtgacggcttggttggggtcgctgcgaggggactacttggagcgccgaggcgtgagtcgtagcctgtggcttggggtcgggagtgcaggaggcgaaaatgtttgccattcttttgaaagtctggcctgggtgtgggagttcggtcatcgaacacttactgagagccagatacctgccaggcactgccctgggctccagggacacatcagtcaacgaacggaagggccctgctctcaagcagtgcgaaaagcagattataaacaagtcaacaaacgggattatctaaggtggtagttctctactcacatcttttaatcttgaagactagaaaatataactggatctgccacttgtttggaaaatatctctaccaagcaataaattacccgctgtgcttttgttgtagtgtagaagtttttgagttctccaaatctaaacaagattttgtcccattttcccatgaagctacattgttgcttattcactttagtggcaagtattattgtgccagctgcttttgttttggaagatgtggacttcgaccaaatggtttcactggaagcaaatcgtagttcttacaatgcatcctttccctcaagctttgaactctcagcaagttcccactcggatgatgacgtcatcatagccaaagagggaactagcgtttcaattgagtgtcttctcacagccagtcactatgaagatgtccattggcacaattcaaaaggacagcaactggatggcagaagcagaggtggaaagtggttggtttctgataacttcctaaacatcaccaatgtagcttttgatgaccgtgggctctatacctgtttcgtcacctctccaattcgtgcctcctactctgtcaccctacgtgttatcttcacctcgggagacatgagtgtctattacatgattgtttgcctgattgcctttacaatcacactcatcttgaatgtcacacggctgtgcatgatgagcagccatcttcgcaagactgagaaggccatcaatgagttctttagaactgaaggggctgagaaacttcagaaggcctttgagattgcaaaacgtatccccatcattacctcagccaaaactctggagctcgccaaagtcacacaatttaagaccatggagtttgctcgttatattgaagaactggcaagaagtgtccctcttccacctcttattctaaactgtcgagcctttgttgaggagatgtttgaggctgtgcgagtggatgaccctgatgacctgggtgaaagaattaaagagagacctgccttgaatgctcaaggtggcatctatgtcattaacccagagatgggacggagtaattcaccaggaggagattcagatgatggctctctgaatgaacaaggccaggaaatagcagttcaggtttctgtccaccttcagtcagaaaccaaaagtattgatacagagtctcaaggcagcagtcatttcagtccacctgatgatataggatctgcagaatctaactgtaactacaaagatggggcatatgaaaactgtcagctgtaacctacaatgctgtaacccagtacctacaaaatcagctcgctctcagaaaaggaacctgtttcttagaagaagtaacatttttgccaaaagatgactggggttttccgtttgttaatattaagcacatcagaacgtgaattgccaaagtcttcattagaaggcagcatttttcctctctgatacttttcagtcattttccttagagctttattaaattatgcatgctaagatttaaaggagccccagataaacatgatggggaaaagcactgaactaagagtcccatggtttctcttctggtcacagttcttccattggttggatctgatacttatcttgggacttcagtttttccgtcaataagatgagggattaggtgagatctgaagttgtttctagctctatagcttcttaacccatcacctttaaattaccagaatcttcactcatctctaagtaaacctttcccgggacttttactcgcttcttttggaaaggattaagctgagatctaaatttccacaccaatgtcataatgcacagaggtttttgaaaaacatctgagtgtttttcagatgttttgccatgtggagcatataatgatatgtgcaagattgaatcttttcaatgtagcacatgtctgtagggttatacagatgtcagagagctaactgctctgtaaactactttccatgagtaaattggtccttggtgggggtgtatcatatttttaacttactgagacatcattttagttcattgaggttggcagggattgcctaactgatcttccaaagtgagcagtttatttctaaggtataacgtctttgatgcttttagaataagaacagtgtcaaatcatctgtcttctggaaaatcatggattttcatatttctgttaacagaatttctcaggctttccctttttaaaagtattggactctacaaataggttctatatttgggatctcatcctaggagaaaacccaaaactggattcctcttaagacctctgtcaaccctcctgccctttgtggtcttaggtatggtgctataggttgcatgcgtctttatcttgtttgtttggttaatattttgttgttgaggtttttatttttgtttacttcagatacgtaattctgagctatggctgcttttgtagcctttccgagaagcactaacctgaaataagattagataattgtgagggtgtgttactatattaaaatacacacacaactgatctagacatcaagaggaagaaaaatgatggatgatgccacctgcttcaactgtatataataaacacttatgatgacaaaaaaaaaaaaaaaaaaaaaaaaaaaaaa

SEQ ID NO: 1149 - DNA, 454 bp, Artificial Sequence
  Description of Artificial sequences:primer
  misc_feature (1)..(454): 3' terminal sequence from clone image:489497. general transcription factor iih, polypeptide 4, 52kda(GTF2H4) gene.
  misc_feature (118)..(118): n is a, c, g, or t
  misc_feature (123)..(123): n is a, c, g, or t
  misc_feature (219)..(219): n is a, c, g, or t
  misc_feature (405)..(405): n is a, c, g, or t
  misc_feature (454)..(454): n is a, c, g, or t
ttttttttttttttttttttagctatcataactttattaaacaagaaaagccctgacgcgtaaataaaaaacacctgagttctgatgccccgccccgcccagtcccgcccgccgaggnccgtntccaagtcccgcgctctcaggagctatgtttctgccgcttccaaaagcgcttgacgtcgctgtgcccggccggggtcaccaccatgagccgcttgncgagttctcgaacacgagcacgcccagctcccgcgcgtgggccagcagcagctcaaagtccacttgcgacaggaactggttatacaggacaccctcagtgaaccggagtctgtccctttccagctcccagagccggatctggtcggtgatggtggggggcagcacaggtgtctgtttgagcatcantgggtgggctcttgtccttaggaaatggattatctgctgggctgtgatn

SEQ ID NO: 1150 - DNA, 474 bp, Artificial Sequence
  Description of Artificial sequences:primer
  misc_feature (1)..(474): 5' terminal sequence from clone image:489497. general transcription factor iih, polypeptide 4, 52kda(GTF2H4) gene.
  misc_feature (6)..(6): n is a, c, g, or t
  misc_feature (167)..(167): n is a, c, g, or t
  misc_feature (474)..(474): n is a, c, g, or t
tgcagngacttggatcagctcctcagccaggctgggctcatgaagagtactgaacctggagagccgccctgcattacttccgctggcttccagttcctgttgctggacaccccggctcagctctggtactttatgttgcagtatttgcagacagcccagagccgggnaatggacctggtagagattctctccttcctcttccagctcagcttctctactctgggcaaggattactctgtggaaggtatgagtgattctctgttgaacttcctgcaacatctgcgtgagtttgggcttgttttccagaggaagaggaaatctcggcgttactaccccacaccgccttggccatcaatctctcatcaggtgtctctggagctgggggcactgtgcatcagccaggtttcattgtccgtggaaaccaattaccgactgtatgcctacacggagtcggagctgcagattgccctcatn

SEQ ID NO: 1151 - DNA, 1717 bp, Artificial Sequence
  Description of Artificial sequences:primer
  misc_feature (1)..(1717): general transcription factor iih, polypeptide 4, 52kda(GTF2H4) gene.
ggcacgaggctcttctgaattctccattctgggctcttgcctgtgaaatctttctttgctttccccatcttttcctcgcattttttcaccatctttccctcaatctccaggagccaatgcgagactttggctccgattaagcgacggcccgagactcggggtgcgcgaggaggatcgacagagtggtgatggagagcaccccttcaaggggactgaaccgagtacacctacaatgcaggaatctgcaggaattcttagggggcctgagccctggggtattggaccgattgtatgggcaccctgccacatgtctggctgtcttcagggagctcccatccttggctaagaactgggtgatgcggatgctctttctggagcagcctttgccacaggctgctgtagctctgtgggtaaagaaggaattcagcaaggctcaggaggaaagtacagggctgctgagcggcctccggatctggcacacacagctgctcccaggcgggctccagggcctcatcctcaaccccattttccgccagaacctccgcattgcccttctgggtggggggaaggcctggtctgatgacacaagtcagctgggaccagacaagcatgcccgggacgttccctcccttgacaagtacgccgaggagcgatgggaggtggtcttgcacttcatggtgggctcccccagtgcagctgtcagccaggacttggctcagctcctcagccaggctgggctcatgaagagtactgaacctggagagccgccctgcattacttccgctggcttccagttcctgttgctggacaccccggctcagctctggtactttatgttgcagtatttgcagacagcccagagccggggcatggacctggtagagattctctccttcctcttccagctcagcttctctactctgggcaaggattactctgtggaaggtatgagtgattctctgttgaacttcctgcaacatctgcgtgagtttgggcttgttttccagaggaagaggaaatctcggcgttactaccccacacgcctggccatcaatctctcatcaggtgtctctggagctgggggcactgtgcatcagccaggtttcattgtcgtggaaaccaattaccgactgtatgcctacacggagtcggagctgcagattgccctcattgccctcttctctgagatgctctatcggttccccaacatggtggtggcgcaggtgacccgggagagtgtgcagcaggcaatcgccagtggcatcacagcccagcagataatccatttcctaaggacaagagcccacccagtgatgctcaaacagacacctgtgctgccccccaccatcaccgaccagatccggctctgggagctggaaagggacagactccggttcactgagggtgtcctgtataaccagttcctgtcgcaagtggactttgagctgctgctggcccacgcgcgggagctgggcgtgctcgtgttcgagaactcggccaagcggctcatggtggtgaccccggccgggcacagcgacgtcaagcgcttttggaagcggcagaaacatagctcctgagagcgcgggacttggacacggacctcggcgggcgggactgggcggggcggggcatcagaactcaggtgttttttatttacgcgtcagggcttttcttgtttaataaagttatgatagctaaaaaaaaaaaaaaaaaaaaa

SEQ ID NO: 1152 - DNA, 324 bp, Artificial Sequence
  Description of Artificial sequences:primer
  misc_feature (1)..(324): 3' terminal sequence from clone image:489772. leucine-rich ppr-motif containing(LRPPRC) gene.
  misc_feature (278)..(278): n is a, c, g, or t
acataaagaaaattttcatttatttttccctcagatatacttcaaaatacatgtagacacagaatcacaaatatatacaaaacaaagtatcgcctggttatttcaagaagagttttccctcaattttcttagctgctgtgcataaaattcaaagctttcagggggttcaatgaaagggacaggctctccagcatacttcagcaaagatgcgtaacgctttagaaacagatcatccaattttgtattctttgcagtcaaatgttcatacagtgctttanagatgtgacatctttctctgagacatagcttttcatgagggaattg

SEQ ID NO: 1153 - DNA, 429 bp, Artificial Sequence
  Description of Artificial sequences:primer
  misc_feature (1)..(429): 5' terminal sequence from clone image:489772. leucine-rich ppr-motif containing(LRPPRC) gene.
aacttgtggatgcaggcaaggtggatgatgccagagctctcctacagagatgtggtgcaattgctgaacaaaccccgattttgttgttgttcctccttaggaattctaggaaacaaggaaaggcatcaactgtgaaatctgtgttagaattgattcctgaattaaatgaaaaggaagaagcatacaattccctcatgaaaagctatgtctcagagaaagatgtcacatctgctaaagcactgtatgaacatttgactgcaaagaatacaaaattggatgatctgtttctaaagcggttacgcatctttgctgaagtatgctggagagcctgtccctttcattgaaccccctgaaagctttgaattttatgcacagcagctaagaaaattgagggaaaactcttcttgaaataaccaggcgatactttgt

SEQ ID NO: 1154 - DNA, 5095 bp, Artificial Sequence
  Description of Artificial sequences:primer
  misc_feature (1)..(5095): leucine-rich ppr-motif containing(LRPPRC) gene.
acatgctcctcctgtccttctggcggagcgtgcttcccgctgcggggacgttcgagcaatggcagccctgctgagatccgcgcgttggttgctgcgtgccggggcggccccgcgcctcccgctctccctgcgcctcctccctggcggcccgggccggctgcatgccgcctcctatctgcccgccgctcgcgccgggcccgtggccggaggactactgagcccagccaggctgtatgccattgctgccaaagaaaaagatattcaagaggagtccactttttcttctaggaagatttccaatcagtttgattgggctctaatgagactagatctttctgttcgaagaactggccgcattccaaagaagcttctacaaaaagtttttaatgatacctgccgctcaggtggcctaggtggtagtcatgccttgcttctactacgtagttgtggttctctcttgcctgaactaaagcttgaagagagaacagaatttgctcataggatatgggacacacttcagaaattaggtgctgtgtatgatgtgagtcactataatgctttacttaaagtctatcttcaaaatgaatataaattctcaccaactgatttcctggcaaaaatggaggaagcaaacattcaaccaaatcgagtgacataccagagattgattgcttcttattgtaatgtaggagatattgaaggtgccagcaagattcttggatttatgaaaactaaggatctcccagttacagaggcagtattcagtgcccttgtgacagggcatgccagagctggtgatatggagaatgcagaaaacattctcacagtgatgagagatgccggaattgagcctggtccagacacatacctcgcattattgaatgcatatgctgagaagggcgacattgaccatgttaagcagactctggagaaggtggagaagtccgagcttcaccttatggaccgtgatttactgcaaattatttttagcttcagtaaagctgggtatcctcagtatgtctcagaaattttggaaaaagttacatgtgaaagaagatatattccagatgcaatgaacctcattttacttttagtcactgaaaaattggaagatgtagcgttgcaaattttactagcatgccccgtatcaaaggaagatggcccaagtgtctttggcagtttctttttacaacactgtgtgactatgaatacgcctgtggagaagctaacagactactgtaagaagttaaaggaagtccagatgcactcctttcctctgcagttcaccctccattgtgctttactcgccaataaaactgatttggcaaaagccttaatgaaggctgtgaaggaggaaggttttcctatcagacctcactatttctggccattgctagttggacgtcggaaggaaaaaaatgttcaaggtataattgaaatcctcaaaggaatgcaagaattgggagtacatcctgatcaggaaacatatacagattatgtgattccatgctttgatagtgtaaactcagcacgagccattttgcaggaaaatggatgtctgtctgatagtgatatgttttctcaagctggattgagaagtgaagcagcaaatgggaacttagactttgtattatcatttttgaaatcaaatacattgcccatctcgctgcagtctataagaagtagcctactgctaggcttcaggaggtctatgaatataaatctttggagcgagataacagaattgttgtacaaggatggacgttattgccaggagcctcgaggaccgacggaagctgttggctattttctttataacttgattgacagcatgagtgactcagaagtacaggccaaggaggagcatttgagacaatacttccatcagctggagaagatgaatgtaaaaattcctgaaaatatctacagaggcattcgtaatctcctggaaagctaccatgttcctgaattgattaaggatgctcacttgttggttgagagtaagaatttagactttcaaaaaactgtgcaacttacatcatctgaattggagtccacacttgaaacactaaaagctgaaaatcaacctataagagatgtcctaaagcaactcatattagtgctttgttcagaagagaatatgcaaaaagcccttgaattgaaagcaaaatatgaatccgacatggttactggtggctatgcagctttaataaatttatgctgtcgacatgataaagtagaagatgccttgaacttgaaagaagaatttgaccgcttagattcatctgctgtccttgacaccggcaagtatgtaggccttgtaagagtattggcaaagcatggcaagctccaagatgctattaacattctgaaggagatgaaagagaaggatgttcttatcaaagatacaacagccttgtcctttttccacatgctaaatggcgcagctttaagaggtgaaattgaaacagtaaaacagttgcatgaagccatcgtgactctagggttagcagaaccatccaccaacataagtttcccattggtcactgtacacttggaaaagggcgacctatctactgctcttgaggtcgccattgactgctatgaaaagtataaagtattaccaaggattcatgatgtcttgtgtaaactggtagagaaaggcgagactgatctaattcagaaagcaatggactttgtgagccaagaacaaggtgaaatggtgatgctctatgatctcttctttgccttcctacaaacaggaaattacaaagaggccaagaagatcattgagactccagggattagagctcgatctgcaaggcttcagtggttttgtgacagatgtgttgcaaataatcaggttgaaactctggaaaaattagtggagctgacacagaagctatttgaatgtgatagagaccagatgtactacaatctgctaaaactgtataaaataaacggtgactggcaaagagctgatgcagtctggaataaaatccaagaagaaaatgttattcctcgtgaaaagacattaagattattagcagaaatccttagagagggtaaccaggaagttccgtttgacgtacctgagttgtggtatgaagatgaaaaacattccctgaattcttcgtcagcctcaaccacagaacctgatttccagaaagatatattgattgcctgccgattgaaccaaaaaaaaggggcatatgatattttcctgaatgcaaaagagcaaaacattgtgtttaatgctgaaacctacagcaatctcattaaattactgatgtcagaagattattttacacaagcaatggaagtgaaagcattcgcggagacccacatcaagggcttcacactgaacgatgctgccaacagccgcctcatcataacgcaagttaggcgggattatttgaaagaggctgtgacaacactgaaaacagtattggatcagcagcagaccccttctaggttagcagtgacccgtgtcatccaggcattggccatgaagggtgatgttgaaaacatagaagtagttcagaagatgttaaatggactcgaagactccattggactttcaaaaatggttttcatcaataacattgctttggctcaaataaagaataataacatagatgccgcaatagaaaacattgaaaatatgcttacttcagagaataaagtcattgaaccccaatacttcggcttggcatacttattcagaaaagtaatagaggagcagttggaaccagcagttgaaaagataagcatcatggcggagagattggccaatcagtttgcaatttataaacctgtcactgattttttccttcaacttgtggatgcaggcaaggtggatgatgccagagctctcctacagagatgtggtgcaattgctgaacaaaccccgattttgttgttgttcctccttaggaattctaggaaacaaggaaaggcatcaactgtgaaatctgtgttagaattgattcctgaattaaatgaaaaggaagaagcatacaattccctcatgaaaagctatgtctcagagaaagatgtcacatctgctaaagcactgtatgaacatttgactgcaaagaatacaaaattggatgatctgtttctaaagcgttacgcatctttgctgaagtatgctggagagcctgtccctttcattgaaccccctgaaagctttgaattttatgcacagcagctaagaaaattgagggaaaactcttcttgaaataaccaggcgatactttgttttgtatatatttgtgattctgtgtctacatgttattttgaagtatatctgagggaaaaataaatgaaaattttctttatgtacttatgtatgtgtgatgcatgttcaaagtcttattgaccataactctgtgcacttggttattggacatttttggagtttttttctctgggaaaaatcgatagtgttttcttcaatgctgctgctgtgtgaagccatactttttcaggattcttcccctaattggctctttggtttccctgctctgtttcatttatttcattaaaatgttattcctttatttaagattcacttattagtctgctgtttctctgaaaaattttagagctaggtatagtgaccgtgaactttctaacgcataatattctgtgatacagccattccgtacatgtgtgaagtcctgcataactttcgaactttgttaaatgttggcactaggagtcatcagatctaggcttcatcattttccagtgagaagcagagacccaaagggcctgttacttgtgcttggtcaggggactgtctgtcatgcctggaggctcttcggcacacttccccatctttcccttctgccactgtggcttcaagcacctctgttcatagagcgtctctgaaattgagtctcggtcatgacttatcccgaagtagagcaatgtgtttcctctcattgtagtttcaggactttgtcagtacaagctctgccctaggcttgttactttatactcatatcctgaaaagatgtgatttcatctatgaaggggtaaaatattggtttgtatttaattgtttgaaataaaagtgatccctata

SEQ ID NO: 1155 - DNA, 511 bp, Artificial Sequence
  Description of Artificial sequences:primer
  misc_feature (1)..(511): 3' terminal sequence from clone image:489950. kiaa0232 gene product(KIAA0232) gene.
  misc_feature (284)..(284): n is a, c, g, or t
tttttttttttttgttttttacaatttttatttggtgttaactccacaagaaaacaaacaaaaaaaaatcagttactctggtgtacgtgaaatcagaacaatacaaccacgggaaaaacaatctcagcccaggaatggaaactggtacttcagtgctatggaaatgcaatgcgcttcataccacagtgcgtttcagcgtttgccaactttttaaaaatgctttttctttgtgatcatccattcacaaaactaaaaagccacactttcatctctgttgctgaaanctctgagcttcagctacttaactatgaaaacaaataaatacataatttgtgaatccctttgctcacttcgaatccgtcccattcacctgtggaaggtgctgcatcttctcacctgtgtctgaggaagtgtgcacctttgccacctggagccctttcctaataaacagcagctgtccaaaatcaactgtgctcaagggtgtgtctgaaatctatttatttgggctttg

SEQ ID NO: 1156 - DNA, 537 bp, Artificial Sequence
  Description of Artificial sequences:primer
  misc_feature (1)..(537): 5' terminal sequence from clone image:489950. kiaa0232 gene product(KIAA0232) gene.
  misc_feature (8)..(8): n is a, c, g, or t
  misc_feature (12)..(13): n is a, c, g, or t
  misc_feature (520)..(520): n is a, c, g, or t
ctgacganttanntctagaaatcggttgcttgtgtagcaaagaccaaataaatagatttcagacacaaccttgagcacagttgattttggacagctgctgtttattaggaaagggctccaggtggcaaaggtgcacacttcctcagacacaggtgagaagatgcagcaccttccacaggtgaatgggacggattcgaagtgagcaaagggattcacaaattatgtatttatttgttttcatagttaagtagctgaagctcagaggctttcagcaacagagatgaaagtgtggctttttagttttgtgaatggatgatcacaaagaaaaagcatttttaaaaagttggcaaacgcctgaaacgcactgtggtatgaagcgcattgcatttccatagcactgaagtaccagtttccattcctgggctgagattgtttttcccgtggttgtattgttctgatttcacgtacaccagagtaactgatttttttttgtttgttttcctgttggaagttaacaccnaattaaaattgtaaaaa

SEQ ID NO: 1157 - DNA, 466 bp, Artificial Sequence
  Description of Artificial sequences:primer
  misc_feature (1)..(466): 3' terminal sequence from clone image:489961. general transcription factor iif, polypeptide 1, 74kda(GTF2F1) gene.
  misc_feature (359)..(359): n is a, c, g, or t
  misc_feature (430)..(430): n is a, c, g, or t
  misc_feature (444)..(444): n is a, c, g, or t
  misc_feature (455)..(455): n is a, c, g, or t
tttttttttctggggggcagagcattgtattggaccaagcctcactccttgagggagaagtgcattttgtcgttgatcatcttgcgctcggggttgagtcgcttgaggatctgggccaacacgttcactgtctgctcgctgctcagccctgtcttcttggtctggaactttttcagcaggtccttagtggtcatgggcttccgtgtcaggtagcggcgcacggcatcctcagtcacctgcacgtcgccgctgttgggtgttgtctttgcctgatggtggctggggtgtcgacttcccagacaggctctgggggtcccgtgtcaagccgcaaccgctttggctgcaaggaatctcggttnaaccgggtttccctttgcttcgaagtttgctggcaaacccgcccgcaagttggaaaggaaggtgctgcaancctttgcgctgggnttgcctgggcngctgttgcccc

SEQ ID NO: 1158 - DNA, 595 bp, Artificial Sequence
  Description of Artificial sequences:primer
  misc_feature (1)..(595): 5' terminal sequence from clone image:489961. general transcription factor iif, polypeptide 1, 74kda(GTF2F1) gene.
  misc_feature (3)..(3): n is a, c, g, or t
  misc_feature (33)..(33): n is a, c, g, or t
  misc_feature (36)..(36): n is a, c, g, or t
  misc_feature (38)..(45): n is a, c, g, or t
  misc_feature (47)..(50): n is a, c, g, or t
  misc_feature (53)..(53): n is a, c, g, or t
  misc_feature (55)..(55): n is a, c, g, or t
  misc_feature (85)..(85): n is a, c, g, or t
  misc_feature (87)..(87): n is a, c, g, or t
  misc_feature (114)..(114): n is a, c, g, or t
  misc_feature (194)..(194): n is a, c, g, or t
  misc_feature (231)..(231): n is a, c, g, or t
  misc_feature (309)..(309): n is a, c, g, or t
  misc_feature (337)..(337): n is a, c, g, or t
  misc_feature (414)..(414): n is a, c, g, or t
  misc_feature (520)..(520): n is a, c, g, or t
  misc_feature (545)..(545): n is a, c, g, or t
  misc_feature (550)..(550): n is a, c, g, or t
  misc_feature (567)..(567): n is a, c, g, or t
  misc_feature (590)..(590): n is a, c, g, or t
gtnaggaggagaagccgcctgaggaggacaagnttntnnnnnnnnannnnttntnacccaccccgcagactaagaagcgcaggananacagcagcgaggagtcggacagctcanaggagagcgacattgacagcgaggcctcctcagccctcttcatggcgaagaagaagacgccacccaagagagagcggaancgtcgggagggagctcaaggggcaacagccgcccagnacgcccagcgcagagggtggcagcacctcctccaccctgcggcggctgcagcaaactcgagcaagggaagcgggtgancgagatgcctgcagccaagcgggttgcngctggacacgggaccccagagcctgtctgggaagtcgacaccccagccaccatcaggcaagacaacacccaacagcngcgacgtgcaggtgactgaggatgccgtgcgccgctacctgacacggaagcccatgaccactaaggaccttgctgaaaaagtttccagaccaagaagacagggctnagcagcgaacagacagtttaacgtntttgnccaatttcttaagcgantcaaccccgagcgcaagatgatnaacga

SEQ ID NO: 1159 - DNA, 2440 bp, Artificial Sequence
  Description of Artificial sequences:primer
  misc_feature (1)..(2440): general transcription factor iif, polypeptide 1, 74kda(GTF2F1) gene.
cttgagcgcctcttccggttaccttttcccagcgccagaggcgcctagggttggggtcctcgctcaggcacagagacccgacaccgagcggcggcttccccgggatcgagggacgcgcacgccagaggagacgaaaggaacccgggtcggaccagatcggaaccactgaccattgcccatggcggccctaggccctagcagccagaatgtcactgaatacgtcgttcgagttcctaagaatacaaccaaaaaatataacatcatggcttttaatgcagccgacaaagtcaactttgctacgtggaatcaggctcggctggagcgggacttgagcaacaagaaaatctaccaagaggaggagatgcccgaatcgggcgcgggcagtgagttcaaccgcaagcttcgggaggaggctcggaggaagaagtacggcatcgtcctcaaggagttccggcccgaggaccagccctggctgctccgggtcaacggcaaatcaggcaggaagttcaagggcatcaagaagggaggcgtaacagagaacacgtcctactacatcttcacccagtgccccgacggggccttcgaggccttccccgtgcacaactggtacaatttcacaccgctggcccggcatcgcacgctcactgccgaggaggccgaggaggagtgggagaggaggaacaaggtgctgaaccacttcagcatcatgcagcagcggcggctcaaggatcaggaccaggacgaggatgaggaggagaaggagaaacgtggccgcaggaaggcgagcgagctgcgcatccacgacctggaggacgacctggagatgtcgtccgatgccagtgatgccagtggtgaggaggggggcagagtccccaaggccaagaagaaggcgccgctggccaagggcggcaggaaaaagaagaagaagaagggttcagacgacgaggccttcgaggacagcgatgatggggacttcgagggccaagaggtggactacatgtcagacggctccagtagctcccaagaagagcctgagagcaaggccaaggcgccgcagcaggaggaggggcccaagggtgtcgatgagcagagcgacagtagtgaggagagtgaggaggagaagccgcctgaggaggacaaggaggaggaggaggagaagaaggcacccaccccgcaggagaagaagcgcaggaaagacagcagcgaggagtcggacagctcagaggagagcgacattgacagcgaggcctcctcagccttcttcatggcgaagaagaagacgccacccaagagagagcggaagccgtcgggagggagctcaaggggcaacagccgcccaggcacgcccagcgcagagggtggcagcacctcctccaccctgcgggcggctgccagcaaactcgagcaagggaagcgggtgagcgagatgcctgcagccaagcggttgcggctggacacgggaccccagagcctgtctgggaagtcgacaccccagccaccatcaggcaagacaacacccaacagcggcgacgtgcaggtgactgaggatgccgtgcgccgctacctgacacggaagcccatgaccactaaggacctgctgaaaaagttccagaccaagaagacagggctgagcagcgagcagacagtgaacgtgttggcccagatcctcaagcgactcaaccccgagcgcaagatgatcaacgacaaaatgcacttctccctcaaggagtgaggcttggtccaatacatggctctgccccccagaacttaaggctctcactgccccttcgccatcctagagtgaggctctgtccaatacatggctctgccctccagaacttcaggctctcagtgacccttcgacatcctgcttgctccctgactcccagggccccgtagttagcaattctggaaaagttaagccatctcctcctctggcccttccttctggaatcttcagatgcctgttaggccttcttattgtcctcctcctcctggctcggcctccctcacactgaccaagggcctgtgctgcccactgggtaacttctacagttctcccttccacttccctaagtctctcttcagctgtgacttatccaccacatagcccagtaagtcttcagttttggctgggcatgatggtgagcgcctgcagtcccagctacttgggaggctaagcccagttcaaggctgcagtgaactatgatggtgccactgcattccagcctgggtgacagaatgaaatcctggcacaaaaaaaaaaaagtagccaggcatggtggcgggagcctgttgtcccagctgttccgtaggctgaggcacgagattcacttgaacctgggaggtggaggttgctgtgagctgacaccacgccactgcactccagcctgggtgacagtgagactctgtctcaataaataaaaaataataataaatt

SEQ ID NO: 1160 - DNA, 406 bp, Artificial Sequence
  Description of Artificial sequences:primer
  misc_feature (1)..(406): 3' terminal sequence from clone image:490174. proteasome (prosome, macropain) 26s subunit, non-atpase, 3(PSMD3) gene.
  misc_feature (48)..(48): n is a, c, g, or t
  misc_feature (122)..(122): n is a, c, g, or t
  misc_feature (182)..(182): n is a, c, g, or t
  misc_feature (356)..(356): n is a, c, g, or t
  misc_feature (392)..(392): n is a, c, g, or t
gcgtcacgctccgggtttgcagctgctccgtcatcgtgcggcccgacnctatctcgcgctcgtgtgcaggcccggctcggctcctggtccccggtgcgagggttaacgcgaggccccggctngttccccggactaggccgtgaccccgggtgccatgaagcaggagggctcggcgcggcgcncggcggactaaggcgaaaccgcgcccggatggaagaacaagaacccccaccgccgccggcccccaggatgtggagatgaaagaggaggcagcgacgggtggcgggtcaacgggggaggcagacggcaagacggcggcggcacggcttgaagcaacttccagccaagactggaantacagtcacctttggaaggacatcaaggagcacgtnaaacaagcttagag

SEQ ID NO: 1161 - DNA, 417 bp, Artificial Sequence
  Description of Artificial sequences:primer
  misc_feature (1)..(417): 5' terminal sequence from clone image:490174. proteasome (prosome, macropain) 26s subunit, non-atpase, 3(PSMD3) gene.
  misc_feature (12)..(12): n is a, c, g, or t
  misc_feature (30)..(30): n is a, c, g, or t
  misc_feature (59)..(59): n is a, c, g, or t
  misc_feature (323)..(323): n is a, c, g, or t
  misc_feature (331)..(331): n is a, c, g, or t
  misc_feature (387)..(387): n is a, c, g, or t
  misc_feature (411)..(411): n is a, c, g, or t
cattcggcaccnggggaggggtgtcgacgnagcttttcccgtgcgggacggaactgtantgtagcctctgtgtccatgggctcttccaggaaggggagcaaaaagtctcgagtggcattatttgaagtgaagaagccctgcacagccttatacagaacatagtggttgaggcggcgtgatgtggaaggcagcatccgcagggcccgcagcacgaatctcggctccttgcctgaaaccgcctttctctagctgtttcacgtgctccttgatgtcctccaaggtgactgtgtccagctctcgctgggaagtgctcagccgctgcncgccgccngtcttgcccgtctgccttcccccgtttgaccccggcaaaccgtccgcttgccttcntcttttcatcttccacatcctgcnggggga

SEQ ID NO: 1162 - DNA, 2174 bp, Artificial Sequence
  Description of Artificial sequences:primer
  misc_feature (1)..(2174): proteasome (prosome, macropain) 26s subunit, non-atpase, 3(PSMD3) gene.
agaaggcccagcgccgggaaggggtttgcagctgctccgtcatcgtgcggcccgacgctatctcgcgctcgtgtgcaggcccggctcggctcctggtccccggtgcgagggttaacgcgaggccccggcctcggtccccggactaggccgtgaccccgggtgccatgaagcaggagggctcggcgcggcgccgcggcgcggacaaggcgaaaccgccgcccggcggaggagaacaagaacccccaccgccgccggccccccaggatgtggagatgaaagaggaggcagcgacgggtggcgggtcgacgggggaggcagacggcaagacggcggcggcagcggctgagcactcccagcgagagctggacacagtcaccttggaggacatcaaggagcacgtgaaacagctagagaaagcggtttcaggcaaggagccgagattcgtgctgcgggccctgcggatgctgccttccacatcacgccgcctcaaccactatgttctgtataaggctgtgcagggcttcttcacttcaaataatgccactcgagactttttgctccccttcctggaagagcccatggacacagaggctgatttacagttccgtccccgcacgggaaaagctgcgtcgacacccctcctgcctgaagtggaagcctatctccaactcctcgtggtcatcttcatgatgaacagcaagcgctacaaagaggcacagaagatctctgatgatctgatgcagaagatcagtactcagaaccgccgggccctagaccttgtagccgcaaagtgttactattatcacgcccgggtctatgagttcctggacaagctggatgtggtgcgcagcttcttgcatgctcggctccggacagctacgcttcggcatgacgcagacgggcaggccaccctgttgaacctcctgctgcggaattacctacactacagcttgtacgaccaggctgagaagctggtgtccaagtctgtgttcccagagcaggccaacaacaatgagtgggccaggtacctctactacacagggcgaatcaaagccatccagctggagtactcagaggcccggagaacgatgaccaacgcccttcgcaaggcccctcagcacacagctgtcggcttcaaacagacggtgcacaagcttctcatcgtggtggagctgttgctgggggagatccctgaccggctgcagttccgccagccctccctcaagcgctcactcatgccctatttccttctgactcaagctgtcaggacaggaaacctagccaagttcaaccaggtcctggatcagtttggggagaagtttcaagcagatgggacctacaccctaattatccggctgcggcacaacgtgattaagacaggtgtacgcatgatcagcctctcctattcccgaatctccttggctgacatcgcccagaagctgcagttggatagccccgaagatgcagagttcattgttgccaaggccatccgggatggtgtcattgaggccagcatcaaccacgagaagggctatgtccaatccaaggagatgattgacatctattccacccgagagccccagctagccttccaccagcgcatctccttctgcctagatatccacaacatgtctgtcaaggccatgaggtttcctcccaaatcgtacaacaaggacttggagtctgcagaggaacggcgtgagcgagaacagcaggacttggagtttgccaaggagatggcagaagatgatgatgacagcttcccttgagctggggggctggggaggggtagggggaatggggacaggctctttcccccttgggggtcccctgcccagggcactgtccccattttcccacacacagctcatatgctgcattcgtgcagggggtgggggtgctgggagccagccaccctgacctcccccagggctcctccccagccggtgacttactgtacagcaggcaggagggtgggcaggcaacctccccgggcagggtcctggccagcagtgtgggagcaggaggggaaggatagttctgtgtactcctttagggagtgggggactagaactgggatgtcttggcttgtatgttttttgaagcttcgattatgatttttaaacaataaaaagttctccacagtgaaaaaaaaaaaaaaaaaaaaaaaaaaa

SEQ ID NO: 1163 - DNA, 420 bp, Artificial Sequence
  Description of Artificial sequences:primer
  misc_feature (1)..(420): 3' terminal sequence from clone image:491284. d component of complement (adipsin)(DF) gene.
  misc_feature (16)..(17): n is a, c, g, or t
  misc_feature (62)..(62): n is a, c, g, or t
  misc_feature (80)..(80): n is a, c, g, or t
  misc_feature (263)..(263): n is a, c, g, or t
  misc_feature (306)..(306): n is a, c, g, or t
  misc_feature (315)..(315): n is a, c, g, or t
  misc_feature (395)..(395): n is a, c, g, or t
  misc_feature (399)..(399): n is a, c, g, or t
  misc_feature (407)..(407): n is a, c, g, or t
gaggcgatggcgcacnnggcacttacatggcgtcggtgcagctgaacggcgcgcacctgtgncggcgtcctggtggcggnagtgggtgctgagcgcggcgcactgcctggaggacgcggccgacgggaaggtgcaggttctcctgggcgcgcactccctgtcgcagccggagccctccaagcgcctgtacgacgtgctccgcgcagtgccccacccggacagccagcccgacaccatcgaccacgacctcctgctgctacagntgtcggagaaggccacactgggccctgctgtgcgccccctgcnctggcagcngcgtggaccgcgacgtggcaccgggaactctcttgcgacgtggccggctggggcatagtcaaccacgcgggccgccgccnggancagcctgnagcacgtgctctt

SEQ ID NO: 1164 - DNA, 1071 bp, Artificial Sequence
  Description of Artificial sequences:primer
  misc_feature (1)..(1071): d component of complement (adipsin)(DF) gene.
gcagttctggtcctcctaggagcggccgcctgcgcggcgcggccccgtggtcggatgctgggcggcagagaggccgaggcgcacgcgcggccctacatggcgtcggtgcagctgaacggcgcgcacctgtgcgcaggcgtcctggtggcggagcggtgggtgctgagcgcggcgcactgcctggaggacgcggccgacgggaaggtgcaggttctcctgggcgcgcactccctgtcgcagccggagccctccaagcgcctgtacgacgtgctccgcgcagtgccccacccggacagccagcccgacaccatcgaccacgacctcctgctgctacagctgtcggagaaggccacactgggccctgctgtgcgccccctgccctggcagcgcgtggaccgcgacgtggcaccgggaactctctgcgacgtggccggctggggcatagtcaaccacgcgggccgccgcccggacagcctgcagcacgtgctcttgccagtgctggaccgcgccacctgcaaccggcgcacgcaccacgacggcgccatcaccgagcgcttgatgtgcgcggagagcaatcgccgggacagctgcaagggtgactccgggggcccgctggtgtgcgggggcgtgctcgagggcgtggtcacctcgggctcgcgcgtttgcggcaaccgcaagaagcccgggatctacacccgcgtggcgagctatgcggcctggatcgacagcgtcctggcctagggtgccggggcctgaaggtcagggtcacccaagcaacaaagtcccgagcaatgaagtcatccactcctgcatctggttggtctttattgagcacctactatatgcagaaggggaggccgaggtgggaggatcattggatctcaggagttggagatcagcatgggccacgtagcgcgactccatctctacaaataaataaaaattagctgggcaattggcgggcatggaggtgggtgcttgtagttccagctactcaggaggctgaggtgggaggatgacttgaacgcaggaggctgaggctgcagtgagttgtgattgcaccactgccct

SEQ ID NO: 1165 - DNA, 370 bp, Artificial Sequence
  Description of Artificial sequences:primer
  misc_feature (1)..(370): 3' terminal sequence from clone image:49691. prion protein (p27-30) (creutzfeld-jakob disease, gerstmann-strausler-scheinker syndrome, fatal familial insomnia)(PRNP) gene.
  misc_feature (26)..(26): n is a, c, g, or t
  misc_feature (328)..(328): n is a, c, g, or t
  misc_feature (342)..(342): n is a, c, g, or t
tttttttttttggtgctcatcttcgntcgtttaatttcagtcagatattaaacatttacaatttttttatataacaaaacaagaacatgcaaagttacaaatatagaaaatataaagtacatgcatatttcaaagacctgttaatggtgtccactttggattcttacatgaaacgattcagtgcacattgtaagcctaaggaccacgcaaaagggtttcccacatattaagtattcagtaccttacaaaagttaatgcattagacacttcagatgttaactgctctaaacaaaactcctaagtctgtcctatggcaatatatattttntatacatatatatntttacataggatactcacaagtgcaggc

SEQ ID NO: 1166 - DNA, 652 bp, Artificial Sequence
  Description of Artificial sequences:primer
  misc_feature (1)..(652): 5' terminal sequence from clone image:49691. prion protein (p27-30) (creutzfeld-jakob disease, gerstmann-strausler-scheinker syndrome, fatal familial insomnia)(PRNP) gene.
  misc_feature (429)..(429): n is a, c, g, or t
  misc_feature (436)..(436): n is a, c, g, or t
  misc_feature (491)..(491): n is a, c, g, or t
  misc_feature (554)..(554): n is a, c, g, or t
  misc_feature (627)..(627): n is a, c, g, or t
  misc_feature (633)..(633): n is a, c, g, or t
  misc_feature (640)..(640): n is a, c, g, or t
ttaccccaaccaagtgtactacaggcccatggatgagtacagcaaccagaacaactttgtgcacgactgcgtcaatatcacaatcaagcagcacacggtcaccacaaccaccaagggggagaacttcaccgagaccgacgttaagatgatggagcgcgtggttgagcagatgtgtatcacccagtacgagagggaatctcaggcctattaccagagaggatcgagcatggtcctcttctcctctccacctgtgatcctcctgatctctttcctcatcttcctgatagtgggatgaggaaggtcttcctgttttcaccatctttctaatctttttccagcttgagggaggcggtatccacctgcagcccttttagtggtggtgtctcactctttcttctctctttgtcccggataggctaatcaataccntgggcantgatggggcatgggaaaacataggagtaggacctgagatgttggttcaagccccnttgattgagtttcatcatgagccttgttaatgccagggcagtaaagtataacagcaataaccntggttatctgggttatttttgggttagtgcacaggttgaggtaaaacaatttcggacatttgaatacctttcngggtancttggtnctaaggagttat

SEQ ID NO: 1167 - DNA, 2415 bp, Artificial Sequence
  Description of Artificial sequences:primer
  misc_feature (1)..(2415): prion protein (p27-30) (creutzfeld-jakob disease, gerstmann-strausler-scheinker syndrome, fatal familial insomnia)(PRNP) gene.
cggcgccgcgagcttctcctctcctcacgaccgaggcagagcagtcattatggcgaaccttggctgctggatgctggttctctttgtggccacatggagtgacctgggcctctgcaagaagcgcccgaagcctggaggatggaacactgggggcagccgatacccggggcagggcagccctggaggcaaccgctacccacctcagggcggtggtggctgggggcagcctcatggtggtggctgggggcagcctcatggtggtggctgggggcagccccatggtggtggctggggacagcctcatggtggtggctggggtcaaggaggtggcacccacagtcagtggaacaagccgagtaagccaaaaaccaacatgaagcacatggctggtgctgcagcagctggggcagtggtggggggccttggcggctacatgctgggaagtgccatgagcaggcccatcatacatttcggcagtgactatgaggaccgttactatcgtgaaaacatgcaccgttaccccaaccaagtgtactacaggcccatggatgagtacagcaaccagaacaactttgtgcacgactgcgtcaatatcacaatcaagcagcacacggtcaccacaaccaccaagggggagaacttcaccgagaccgacgttaagatgatggagcgcgtggttgagcagatgtgtatcacccagtacgagagggaatctcaggcctattaccagagaggatcgagcatggtcctcttctcctctccacctgtgatcctcctgatctctttcctcatcttcctgatagtgggatgaggaaggtcttcctgttttcaccatctttctaatctttttccagcttgagggaggcggtatccacctgcagcccttttagtggtggtgtctcactctttcttctctctttgtcccggataggctaatcaatacccttggcactgatgggcactggaaaacatagagtagacctgagatgctggtcaagccccctttgattgagttcatcatgagccgttgctaatgccaggccagtaaaagtataacagcaaataaccattggttaatctggacttatttttggacttagtgcaacaggttgaggctaaaacaaatctcagaacagtctgaaatacctttgcctggatacctctggctccttcagcagctagagctcagtatactaatgccctatcttagtagagatttcatagctatttagagatattttccattttaagaaaacccgacaacatttctgccaggtttgttaggaggccacatgatacttattcaaaaaaatcctagagattcttagctcttgggatgcaggctcagcccgctggagcatgagctctgtgtgtaccgagaactggggtgatgttttacttttcacagtatgggctacacagcagctgttcaacaagagtaaatattgtcacaacactgaacctctggctagaggacatattcacagtgaacataactgtaacatatatgaaaggcttctgggacttgaaatcaaatgtttgggaatggtgcccttggaggcaacctcccattttagatgtttaaaggaccctatatgtggcattcctttctttaaactataggtaattaaggcagctgaaaagtaaattgccttctagacactgaaggcaaatctcctttgtccatttacctggaaaccagaatgattttgacatacaggagagctgcagttgtgaaagcaccatcatcatagaggatgatgtaattaaaaaatggtcagtgtgcaaagaaaagaactgcttgcatttctttatttctgtctcataattgtcaaaaaccagaattaggtcaagttcatagtttctgtaattggcttttgaatcaaagaatagggagacaatctaaaaaatatcttaggttggagatgacagaaatatgattgatttgaagtggaaaaagaaattctgttaatgttaattaaagtaaaattattccctgaattgtttgatattgtcacctagcagatatgtattacttttctgcaatgttattattggcttgcactttgtgagtatctatgtaaaaatatatatgtatataaaatatatattgcataggacagacttaggagttttgtttagagcagttaacatctgaagtgtctaatgcattaacttttgtaaggtactgaatacttaatatgtgggaaacccttttgcgtggtccttaggcttacaatgtgcactgaatcgtttcatgtaagaatccaaagtggacaccattaacaggtctttgaaatatgcatgtactttatattttctatatttgtaactttgcatgttcttgttttgttatataaaaaaattgtaaatgtttaatatctgactgaaattaaacgagcgaagatgagcacc

SEQ ID NO: 1168 - DNA, 469 bp, Artificial Sequence
  Description of Artificial sequences:primer
  misc_feature (1)..(469): 3' terminal sequence from clone image:501939. Strong similarity to protein ref:np_057457.1 ww domain-containing oxidoreductase,isoform 1, ww domain-containing protein wwox.
  misc_feature (230)..(230): n is a, c, g, or t
  misc_feature (271)..(271): n is a, c, g, or t
  misc_feature (327)..(327): n is a, c, g, or t
  misc_feature (425)..(425): n is a, c, g, or t
  misc_feature (455)..(455): n is a, c, g, or t
tttttgatattcaagcatgttcttttattaagcgtaggatgcgaggcacagcaggaggtttaagtacaatgtgaaagcaagagaactgagactgtgattgacagacaaagggattaactaacgttttattctctgccccccaaaatatcctgtgtattcttaagtatatacgcttcccttcctgcctttcaaggtatctaaggaatgatttgaaaaatttgttataatcnctaaagaattttttgtatagcattagcaaaggagtctatgncaagtactttgccacctggtagttctgcgtattctactccctctgggggtcactgncatcctcactggctgggacaaggttccgagatttgtctccccagcagttgctaagctgggctcaatcttgggtcagatgaatgaaaccattatctccnggatcaatgcagccaggagcagtgaacacntgctttttcctccc

SEQ ID NO: 1169 - DNA, 272 bp, Artificial Sequence
  Description of Artificial sequences:primer
  misc_feature (1)..(272): 5' terminal sequence from clone image:501939. Strong similarity to protein ref:np_057457.1 ww domain-containing oxidoreductase,isoform 1, ww domain-containing protein wwox.
  misc_feature (205)..(205): n is a, c, g, or t
  misc_feature (213)..(213): n is a, c, g, or t
  misc_feature (223)..(223): n is a, c, g, or t
  misc_feature (259)..(259): n is a, c, g, or t
  misc_feature (265)..(265): n is a, c, g, or t
aaaggaaataagagcattcacaacagagtgaaaaatcttaagtaccaatgggaagcagggaattcctggggtaaagtatcacttttctggggctgggctaggcataggtctctttgctttctggtggtggcctgtttgaaagtaaaaacctggttggcgtgtaggttccgtatctccctggagaagcaccagcaattctctttcntttactgntatagaatancctgaggtcccctcgtcccatccaagctaccaccanggccancaatgca

SEQ ID NO: 1170 - DNA, 333 bp, Artificial Sequence
  Description of Artificial sequences:primer
  misc_feature (1)..(333): 3' terminal sequence from clone image:502658. chemokine (c-c motif) ligand 11(CCL11) gene.
  misc_feature (262)..(262): n is a, c, g, or t
ggtttcaaaaatggtgattatttatggctttggagttggagatttttggtccagatacttcatggaatcctgcacccacttcttcttggggtcggcacagatatccttggccagtttggtcttgaagatcacagctttctggggacatttgccactggtgattctcctgtagctctctagtcgctgaaggggtatcttcctattggccaggttaaagcagcaggtggttgggacagaagctggcccagcgagcccctggggntggaaggcagctgctatgagcagcaagccacagaagtgctgcggagaccttcatgttggaggctgaaggtg

SEQ ID NO: 1171 - DNA, 376 bp, Artificial Sequence
  Description of Artificial sequences:primer
  misc_feature (1)..(376): 5' terminal sequence from clone image:502658. chemokine (c-c motif) ligand 11(CCL11) gene.
  misc_feature (93)..(93): n is a, c, g, or t
  misc_feature (99)..(99): n is a, c, g, or t
  misc_feature (113)..(113): n is a, c, g, or t
  misc_feature (368)..(368): n is a, c, g, or t
cccagaaaccaccacctctcacgccaaagctcacaccttcagcctccaacatgaaggtctccgcagcacttctgtggctgctgctcatagcanttgccnttcagcccccaggngtcgctgggccagcttctgtcccaaccacctgctgctttaacctggccaataggaagataccccttcagcgactagagagctacaggagaatcaccagtggcaaatgtccccagaaagctgtgatcttcaagaccaaactggccaaggatatctgtgccgaccccaagaagaagtgggtgcaggattccatgaagtatctggaccaaaaatctccaactccaaaagccataaaataatcaccattttttgaaacncaaaaaaa

SEQ ID NO: 1172 - DNA, 925 bp, Artificial Sequence
  Description of Artificial sequences:primer
  misc_feature (1)..(925): chemokine (c-c motif) ligand 11(CCL11) gene.
atgggcaaaggcttccctggaatctcccacactgtctgctccctataaaaggcaggcagatgggccagaggagcagagaggctgagaccaacccagaaaccaccacctctcacgccaaagctcacaccttcagcctccaacatgaaggtctccgcagcacttctgtggctgctgctcatagcagctgccttcagcccccaggggctcgctgggccagcttctgtcccaaccacctgctgctttaacctggccaataggaagataccccttcagcgactagagagctacaggagaatcaccagtggcaaatgtccccagaaagctgtgatcttcaagaccaaactggccaaggatatctgtgccgaccccaagaagaagtgggtgcaggattccatgaagtatctggaccaaaaatctccaactccaaagccataaataatcaccatttttgaaaccaaaccagagcctgagtgttgcctaatttgttttcccttcttacaatgcattctgaggtaacctcattatcagtccaaagggcatgggttttattatatatatatatttttttttttaaaaaaaaaacgtattgcatttaatttattgaggctttaaaacttatcctccatgaatatcagttatttttaaactgtaaagctttgtgcagattctttaccccctgggagccccaattcgatcccctgtcacgtgtgggcaatgttccccctctcctctcttcctccctggaatcttgtaaaggtcctggcaaagatgatcagtatgaaaatgtcattgttcttgtgaacccaaagtgtgactcattaaatggaagtaaatgttgttttaggaatacataaagtatgtgcatattttattatagtcactagttgtaatttttttgtgggaaatccacactgagctgaggggg

SEQ ID NO: 1173 - DNA, 428 bp, Artificial Sequence
  Description of Artificial sequences:primer
  misc_feature (1)..(428): 3' terminal sequence from clone image:503820. ras homolog gene family, member a(ARHA) gene.
  misc_feature (396)..(396): n is a, c, g, or t
  misc_feature (425)..(425): n is a, c, g, or t
agaaaactgcctttattctattagtagttggaaaaattaactggtacagaaaaaaagtttagtcagctggagagaagagagactgagtgccacccatgagaactggtggctcctctgggagggaacctggatacagtgaggagaaaagagcactgtgaattagagccagacgcttaagtccaggtgagacaggttatgccatcttccaaagtgtctaattgcctcaggcgtgaaaccaattcctatttacttagcccagctccatggggtactgagatacatggggccgaaaaggggtaatatggccatcttttatcagaaaaagtgacaaaacgggaatttaaaaaatgaattttccatctggactttatttccaaatacactttcttttttaanaaaaccaatacactttctttgaggatganagt

SEQ ID NO: 1174 - DNA, 250 bp, Artificial Sequence
  Description of Artificial sequences:primer
  misc_feature (1)..(250): 5' terminal sequence from clone image:503820. ras homolog gene family, member a(ARHA) gene.
  misc_feature (50)..(50): n is a, c, g, or t
  misc_feature (181)..(181): n is a, c, g, or t
  misc_feature (203)..(203): n is a, c, g, or t
  misc_feature (224)..(224): n is a, c, g, or t
  misc_feature (237)..(237): n is a, c, g, or t
agagaaacagttggtaacttttgtgaattaggctgtaactactttataantaacatgtcctgcctattatctgtcagctgcaaggtactctggtgagtcaccacttcagggctttactccgtaacagattttgttggcatagctctggggtgggcagttttttgaaaatgggctcaaccangaaaagcccaaagttcatgcangctgtggcaggagtttacagntcctggtgggttncatgtttgggtta

SEQ ID NO: 1175 - DNA, 1777 bp, Artificial Sequence
  Description of Artificial sequences:primer
  misc_feature (1)..(1777): ras homolog gene family, member a(ARHA) gene.
ggctaccctcgccccgcccgcggtcctccgtcggttctctcattagtccacggtctggtcttcagctacccgccttcgtctccgagtttgcgactcgcgggaccggcgtccccggcgcgaagaggctggactcggattcgttgcctgagcaatggctgccatccggaagaaactggtgattgttggtgatggagcctgtggaaagacatgcttgctcatagtcttcagcaaggaccagttcccagaggtgtatgtgcccacagtgtttgagaactatgtggcagatatcgaggtggatggaaagcaggtagagttggctttgtgggacacagctgggcaggaagattatgatcgcctgaggcccctctcctacccagataccgatgttatactgatgtgtttttccatcgacagccctgatagtttagaaaacatcccagaaaagtggaccccagaagtcaagcatttctgtcccaacgtgcccatcatcctggttgggaataagaaggatcttcggaatgatgagcacacaaggcgggagctagccaagatgaagcaggagccggtgaaacctgaagaaggcagagatatggcaaacaggattggcgcttttgggtacatggagtgttcagcaaagaccaaagatggagtgagagaggtttttgaaatggctacgagagctgctctgcaagctagacgtgggaagaaaaaatctggttgccttgtcttgtgaaaccttgctgcaagcacagcccttatgcggttaattttgaagtgctgtttattaatcttagtgtatgattactggcctttttcatttatctataatttacctaagattacaaatcagaagtcatcttgctaccagtatttagaagccaactatgattattaacgatgtccaacccgtctggcccaccagggtccttttgacactgctctaacagccctcctctgcactcccacctgacacaccaggcgctaattcaaggaatttcttaacttcttgcttctttctagaaagagaaacagttggtaacttttgtcaattaggctgtaactactttataactaacatgtcctgccctattatctgtcagctgcaaggtactctggtgagtcaccacttcagggctttactccgtaacagattttgttggcatagctctggggtgggcagttttgaaaatgggctcaaccagaaaagcccaagttcatgcagctgtggcagagttacagttctgtggtttcatgttagttaccttatagttactgtgtaattagtgccacttaatgtatgttaccaaaaataaatatatctacccagactagatgtagtattttgtataattggattctaatactgtcatctcaagaagtgtatggtttaaagaagtgtattggaaataaagtcagatggaaattcattttaaattcccgtttgtcacttttctgataaaagatggccatattaccccttttcggccccatgtatctcagtaccccatggagctgggctaagtaaataggaattggtttcacgcctcaggcaattagacactttggaagatggcataacctgtctcacctggacttaagcgtctggctctaattcacagtgctctttctcctcactgtatccaggttccctcccagaggagccaccagttctcatgggtggcactcagtctctcttctctccagctgactaaactttttttctgtaccagttaatttttccaactactaatagaataaaggcagttttctaaaaaaa

SEQ ID NO: 1176 - DNA, 273 bp, Artificial Sequence
  Description of Artificial sequences:primer
  misc_feature (1)..(273): 3' terminal sequence from clone image:504184. electron-transfer-flavoprotein, beta polypeptide(ETFB) gene.
  misc_feature (262)..(262): n is a, c, g, or t
ttttttttttttttttttttttttttgatgttgagagtcagttttattgccatctctgggaggggctcaaatccgcccaatctccttcagcttggccaccaggtcctcagtggtctccaccttgacgccggccgtgcgctggggcgggtcctccacactgatcacagagagcttggaggtcaggtccacacccaggtccccaggcttgatcacctcgatcttcttcttcttggctttcatgatgttgggcagcgtggcgtanggggctcgttg

SEQ ID NO: 1177 - DNA, 852 bp, Artificial Sequence
  Description of Artificial sequences:primer
  misc_feature (1)..(852): electron-transfer-flavoprotein, beta polypeptide(ETFB) gene.
caccctgtaagtggctgcggcgggaagatggcggagctgcgcgtgctcgtagctgtcaagagggtcatcgactacgccgtgaagatccgagtgaagcctgacaggaccggtgtggtcacggatggtgtgaagcactccatgaaccccttctgtgagatcgcggtggaggaggctgtgcggctcaaggagaagaagctggtgaaggaggtcatcgccgtcagctgtgggcctgcacagtgccaggagacgattcgtaccgccctggccatgggtgcagaccgaggtatccacgtggaggtgcccccagcagaagcagaacgcttgggtcccctgcaggtggctcgggtcctggccaagctggcagagaaggagaaggtggacctggtgctgctgggcaaacaggccatcgatgatgactgtaaccagacagggcagatgacagctggatttcttgactggccacagggcacattcgcctcccaggtgacgctggagggggacaagttgaaagtggagcgggagatcgatgggggcctggagaccctgcgcctgaagctgccagctgtggtgacagctgacctgaggctcaacgagccccgctacgccacgctgcccaacatcatgaaagccaagaagaagaagatcgaggtgatcaagcctggggacctgggtgtggacctgacctccaagctctctgtgatcagtgtggaggacccgccccagcgcacggccggcgtcaaggtggagaccactgaggacctggtggccaagctgaaggagattgggcggatttgagcccctcccagagatggcaataaaactgactctcaacatcaaaaaaaaaaaaaaaaa

SEQ ID NO: 1178 - DNA, 422 bp, Artificial Sequence
  Description of Artificial sequences:primer
  misc_feature (1)..(422): 3' terminal sequence from clone image:504811. zinc finger protein 3 (a8-51)(ZNF3) gene.
  misc_feature (4)..(4): n is a, c, g, or t
  misc_feature (22)..(22): n is a, c, g, or t
  misc_feature (32)..(32): n is a, c, g, or t
  misc_feature (64)..(64): n is a, c, g, or t
  misc_feature (75)..(75): n is a, c, g, or t
  misc_feature (252)..(252): n is a, c, g, or t
  misc_feature (277)..(277): n is a, c, g, or t
  misc_feature (352)..(352): n is a, c, g, or t
  misc_feature (403)..(403): n is a, c, g, or t
tctnccttaactagactggatncacgtctgtntaactacgcaaaaggtaatgctggcatggctnactgggacccnaagtgtggcgaagggactctgctccagtgaactggcgagtgtggaacctcctgacaccttctgaggacctcctgcctgccatgttgctgtggagctcgcactcctcaggcatcccctgatgttgagtgatacaaactctatcaccggaatcgatgctgctgcaatgacaagacttcnttctggttttcagattctaaagttnaaaacaacggacaacaacaggagcgcctgaaagttacggtgcttctccctctccagtgtgggactcgctgatgtntggaaagatggacctgccacagaaggccttccacagtgatgacaccagtanggctttcccccggtgtgga

SEQ ID NO: 1179 - DNA, 2603 bp, Artificial Sequence
  Description of Artificial sequences:primer
  misc_feature (1)..(2603): zinc finger protein 3 (a8-51)(ZNF3) gene.
gtgggtctgtgacagggtccaacagggcctggtccgtgtccggtcccccaaatctgtcgtccctgcccccaggcattggcatcaacaaaagtcagaattcccgggaacttgaacagaggctgctaaattcccagtaattgctcctttggccttctagggactgacttcaaagaaggaaggaaagaatcaggcagtgcttcctcattctcttttaaaacccgcttcccgctgagtctgcacccaggagaccagagagcaccttgcccttccatggaaactcaggctgatctcgtatctcaggaacctcaggccctgcttgacagtgctcttccttcaaaagttcctgccttttccgacaaggacagcctgggggatgagatgttggcggctgcgctcctaaaggccaagtcccaggagctggtaacctttgaggatgtagctgtgtacttcatccggaaggagtggaagcgtttggaacctgctcagagggacctctatagagatgtgatgctggagaattacgggaatgtgttctcactggatcgtgagaccaggactgaaaatgatcaagaaatttctgaagacacaagatcacatggggtcctactgggaagatttcaaaaggatatttctcagggtctcaagtttaaagaagcctatgaacgagaagtcagtctgaaaaggccgctggggaactcccctggagaaagactgaacaggaaaatgccagattttggtcaagtgacagttgaggagaagctaacccccaggggagagagaagcgagaaatataatgattttgggaacagcttcactgtgaattccaaccttatctcacatcagagactccccgtgggagacagaccccataagtgtgatgaatgtagcaagagctttaatcgaacttcagaccttattcaacatcagagaatccacactggggaaaagccctatgaatgtaatgagtgtgggaaggccttcagccagagctcacaccttattcagcatcagagaatccacactggggaaaaaccttatgaatgtagtgattgtgggaaaaccttcagctgtagctctgccctcattctgcatcggaggatccacacgggggagaaaccctatgaatgtaatgagtgtgggaagaccttcagctggagctccaccctcacccaccatcagagaatccacactggtgagaaaccctacgcctgcaatgaatgtgggaaggccttcagcaggagctcaacccttattcaccatcagagaatccacactggagaaaaaccctatgaatgtaatgaatgtgggaaagccttcagccagagctcacacctctatcagcaccagagaatccacactggagagaagccctacgaatgtatggaatgtggaggaaagtttacctacagttcaggccttattcagcatcaaagaatccacaccggggagaacccctatgaatgtagtgagtgtgggaaagccttcaggtacagctcggctcttgttcgccatcagagaattcacactggagagaagcctttgaatgggatcggcatgagcaaaagctccctcagagttacgaccgagttaaatatcagagagtccacgtgaaagagccacacacccattttcctcactttccctgagtctcaagagctcttgccttaccctataaatctcaacagcttaggatgtgtccctttcaactcagacttttcattttagagaatggggcagatggggcaaatcgttgaattttcccagaaatcacaccagccttagaaagcgtcaaggcaagtggatggcgtgctgggaatagaaagcagctctgggaccagttaccccatttaggaaaggagtttgcactaaactgtttttctcacagcagaggaacctttccaaggtggggatggaagcacagtcgggacagaattcgatggattcctttagttggagtccgcgtagtcagcacagacagcagtggaaaggacgctctgggtcctgttatttgctagggagggtaaagggagactatttcaaagctactgttcctagtccagctttaagtttcggtaagaaacatgctgttttgtttcatgatttcgttaattatggaaatttggcattgagggattattttattgagggtagaagagattccagaatcatcatctgtgatgatggtgtcctttagggctcttggagcagccagaccatgtttccaagagaaacctggtgatattgccagcagaccccctgccatcccccccagttgtcctggggctgaatgggcaaatctgtccaaacagctagtaaccggctgtgagggagagggtcagaagcacttagcgttggcctctgattgctgtcctctcttgtcctcttcccactccaatgatgaaaatgattttctctaaatgcctgggtaaggatgctttcaaggagctcacttggcctgcttgccctgccctctcacctctgacacccagccccaggagccagaccactcctgcctccacctctgactcttcagcagctgaagattaatgcagagaaagagcaaagcccaaaagggagaaaaaaaaaacaaaaaaaaaaaaaaa

SEQ ID NO: 1180 - DNA, 418 bp, Artificial Sequence
  Description of Artificial sequences:primer
  misc_feature (1)..(418): 3' terminal sequence from clone image:505573. phosphorylase, glycogen, liver (hers disease, glycogen storage disease type vi)(PYGL) gene.
  misc_feature (418)..(418): n is a, c, g, or t
cccttggaaattgacactttatttttaagctctattacatataatttccctccccattcccagagatactcaactattatagattattgctaacaaaacaaaaaccagtgaatgttgtaaaaatgttcaagttcagtaagaagctatgttttctagagacattgtagagttcaatttccattgactttgttagattcattggatagagaaatctttagatctgaaggttccacgttccagatgttttgggcatattctctcacaagccaccgggccttcaggacatctcaagattcagtcttgacaatataatagcaaaagctggactaaagcccaaatggattgtctgtggcaatgcagaagctgatagcattaacagcagggtgttacagcataattgttaattcgcacatctatn

SEQ ID NO: 1181 - DNA, 2643 bp, Artificial Sequence
  Description of Artificial sequences:primer
  misc_feature (1)..(2643): phosphorylase, glycogen liver (hers disease, glycogen storage disease type vi)(PYGL) gene.
ccgcacttccagctctctgcgcagcccgccgcgcagcccgccgccccagccatggcgaagcccctgacggaccaggagaagcggcggcagatcagcatccgcggcatcgtgggcgtggagaacgtggcagagctgaagaagagtttcaaccggcacctgcacttcacgctggtcaaggaccgcaacgtggccaccacccgcgactactacttcgcgctggcgcacacggtgcgcgaccacctggtggggcgctggatccgcacgcagcagcactactacgacaagtgccccaagagggtatattacctctctctggaattttacatgggccgaacattacagaacaccatgatcaacctcggtctgcaaaatgcctgtgatgaggccatttaccagcttggattggatatagaagagttagaagaaattgaagaagatgctggacttggcaatggtggtcttgggagacttgctgcctgcttcttggattccatggcaaccctgggacttgcagcctatggatacggcattcggtatgaatatgggattttcaatcagaagatccgagatggatggcaggtagaagaagcagatgattggctcagatatggaaacccttgggagaagtcccgcccagaattcatgctgcctgtgcacttctatggaaaagtagaacacaccaacaccgggaccaagtggattgacactcaagtggtcctggctctgccatatgacacccccgtgcccggctacatgaataacactgtcaacaccatgcgcctctggtctgctcgggcaccaaatgactttaacctcagagactttaatgttggagactacattcaggctgtgctggaccgaaacctggccgagaacatctcccgggtcctctatcccaatgacaatttttttgaagggaaggagctaagattgaagcaggaatactttgtggtggctgcaaccttgcaagatatcatccgccgtttcaaagcctccaagtttggctccacccgtggtgcaggaactgtgtttgatgccttcccggatcaggtggccatccagctgaatgatactcaccctgcactcgcgatccctgagctgatgaggatttttgtggatattgaaaaactgccctggtccaaggcatgggagctcacccagaagaccttcgcctacaccaaccacacagtgctcccggaagccctggagcgctggcccgtggacctggtggagaagctgctccctcgacatttggaaatcatttatgagataaatcagaagcatttagatagaattgtggccttgtttcctaaagatgtggaccgtctgagaaggatgtctctgatagaagaggaaggaagcaaaaggatcaacatggcccatctctgcattgtcggttcccatgctgtgaatggcgtggctaaaatccactcagacatcgtgaagactaaagtattcaaggacttcagtgagctagaacctgacaagtttcagaataaaaccaatgggatcactccaaggcgctggctcctactctgcaacccaggacttgcagagctcatagcagagaaaattggagaagactatgtgaaagacctgagccagctgacgaagctccacagcttcctgggtgatgatgtcttcctccgggaactcgccaaggtgaagcaggagaataagctgaagttttctcagttcctggagacggagtacaaagtgaagatcaacccatcctccatgtttgatgtccaggtgaagaggatacatgagtacaagcgacagctcttgaactgtctgcatgtgatcacgatgtacaaccgcattaagaaagaccctaagaagttattcgtgccaaggacagttatcattggtggtaaagctgccccaggatatcacatggccaaaatgatcataaagctgatcacttcagtggcagatgtggtgaacaatgaccctatggttggaagcaagttgaaagtcatcttcttggagaactacagagtatctcttgctgaaaaagtcattccagccacagatctgtcagagcagatttccactgcaggcaccgaagcctcggggacaggcaatatgaagttcatgctaaatggggccctaactatcgggaccatggatggggccaatgtggaaatggcagaagaagctggggaagagaacctgttcatctttggcatgaggatagatgatgtggctgctttggacaagaaagggtacgaggcaaaagaatactatgaggcacttccagagctgaagctggtcattgatcaaattgacaatggctttttttctcccaagcagcctgacctcttcaaagatatcatcaacatgctattttatcatgacaggtttaaagtctttgcagactacgaagcctatgtcaagtgtcaagataaagtgagtcagctgtacatgaatccaaaggcctggaacacaatggtactcaaaaacatagctgcctcggggaaattctccagtgaccgaacaattaaagaatatgcccaaaacatctggaacgtggaaccttcagatctaaagatttctctatccaatgaatctaacaaagtcaatggaaattgaactctacaatgtctctagaaaacatagcttcttactgaacttgaacat

SEQ ID NO: 1182 - DNA, 482 bp, Artificial Sequence
  Description of Artificial sequences:primer
  misc_feature (1)..(482): 3' terminal sequence from clone image:50561. protein kinase c, beta 1(PRKCB1) gene.
  misc_feature (173)..(173): n is a, c, g, or t
  misc_feature (415)..(415): n is a, c, g, or t
  misc_feature (436)..(436): n is a, c, g, or t
  misc_feature (474)..(474): n is a, c, g, or t
ttttttttttatattaattcagtttaatcatatcaattcttaaacaaaaaacttcctccaagagacaatagttcacagtaactgcaaagcttactcacaatttttaaaaatatcgctcatgcttagcattcaaagaagatattatagaataactgtaaaaacttttaccaggnacatcagcttctgacttgaaaaattacaaatactgaaggcattttggtatcagacacagtagttttgacattgtctgttcatttgatgagtttctggaagtttggaaaattgtacctctataattgggataatgcgcttattctaaactaaacattttcaaatgtaggaaaacaaactaggcaaggctacacatacaaaggaaaagccctctaaggccaggctttcccacatgttggaatgnccagcctgtgcaccgtgaatnccggggaggctaggattgatacatacgttggctttgangtttactt

SEQ ID NO: 1183 - DNA, 454 bp, Artificial Sequence
  Description of Artificial sequences:primer
  misc_feature (1)..(454): 5' terminal sequence from clone image:50561. protein kinase c, beta 1(PRKCB1) gene.
  misc_feature (404)..(404): n is a, c, g, or t
  misc_feature (414)..(414): n is a, c, g, or t
  misc_feature (433)..(433): n is a, c, g, or t
gactccagctccacctgccccaggtggtgtggtgatgatgaggaaagacaagaggcttgcaaggaccctgaagaggtcggagcatcatacagattcctttattagcccacattctgatgttccctggtgagacttgccccaagcaattgctagtaaatgggggttaatttcttctccacctccctactgaacaaaaaaagaaatgccagacttactaggagaatcgagttgctttgagtttcttttgttttgttttgttttgttttgttttaaggctccccttacacaccctcctttaagctttgggttttctctcttatagtttgttgacacatgctaaaaatgtctttgggagagaacttctggcctggataaacacccaattctaggactgtggggtgggnttttcgagcntgacggtgggtcaattccntttcattaaggcagtgatctg

SEQ ID NO: 1184 - DNA, 3017 bp, Artificial Sequence
  Description of Artificial sequences:primer
  misc_feature (1)..(3017): protein kinase c, beta 1(PRKCB1) gene.
agcgggcgcgccgcggccgccagagccggcgcaggggaagcgcccgcggccccgggtgcagcagcggccgccgcctcccgcgcctccccggcccgcagcccgcggtcccgcggccccggggccggcacctctcgggctccggctccccgcgcgcaagatggctgacccggctgcggggccgccgccgagcgagggcgaggagagcaccgtgcgcttcgcccgcaaaggcgccctccggcagaagaacgtgcatgaggtcaagaaccacaaattcaccgcccgcttcttcaagcagcccaccttctgcagccactgcaccgacttcatctggggcttcgggaagcagggattccagtgccaagtttgctgctttgtggtgcacaagcggtgccatgaatttgtcacattctcctgccctggcgctgacaagggtccagcctccgatgacccccgcagcaaacacaagtttaagatccacacgtactccagccccacgttttgtgaccactgtgggtcactgctgtatggactcatccaccaggggatgaaatgtgacacctgcatgatgaatgtgcacaagcgctgcgtgatgaatgttcccagcctgtgtggcacggaccacacggagcgccgcggccgcatctacatccaggcccacatcgacagggacgtcctcattgtcctcgtaagagatgctaaaaaccttgtacctatggaccccaatggcctgtcagatccctacgtaaaactgaaactgattcccgatcccaaaagtgagagcaaacagaagaccaaaaccatcaaatgctccctcaaccctgagtggaatgagacatttagatttcagctgaaagaatcggacaaagacagaagactgtcagtagagatttgggattgggatttgaccagcaggaatgacttcatgggatctttgtcctttgggatttctgaacttcagaaagccagtgttgatggctggtttaagttactgagccaggaggaaggcgagtacttcaatgtgcctgtgccaccagaaggaagtgaggccaatgaagaactgcggcagaaatttgagagggccaagatcagtcagggaaccaaggtcccggaagaaaagacgaccaacactgtctccaaatttgacaacaatggcaacagagaccggatgaaactgaccgattttaacttcctaatggtgctggggaaaggcagctttggcaaggtcatgctttcagaacgaaaaggcacagatgagctctatgctgtgaagatcctgaagaaggacgttgtgatccaagatgatgacgtggagtgcactatggtggagaagcgggtgttggccctgcctgggaagccgcccttcctgacccagctccactcctgcttccagaccatggaccgcctgtactttgtgatggagtacgtgaatgggggcgacctcatgtatcacatccagcaagtcggccggttcaaggagccccatgctgtattttacgctgcagaaattgccatcggtctgttcttcttacagagtaagggcatcatttaccgtgacctaaaacttgacaacgtgatgctcgattctgagggacacatcaagattgccgattttggcatgtgtaaggaaaacatctgggatggggtgacaaccaagacattctgtggcactccagactacatcgcccccgagataattgcttatcagccctatgggaagtccgtggattggtgggcatttggagtcctgctgtatgaaatgttggctgggcaggcaccctttgaaggggaggatgaagatgaactcttccaatccatcatggaacacaacgtagcctatcccaagtctatgtccaaggaagctgtggccatctgcaaagggctgatgaccaaacacccaggcaaacgtctgggttgtggacctgaaggcgaacgtgatatcaaagagcatgcatttttccggtatattgattgggagaaacttgaacgcaaagagatccagcccccttataagccaaaagcttgtgggcgaaatgctgaaaacttcgaccgatttttcacccgccatccaccagtcctaacacctcccgaccaggaagtcatcaggaatattgaccaatcagaattcgaaggattttcctttgttaactctgaatttttaaaacccgaagtcaagagctaagtagatgtgtagatctcagtccttcatttctgtcattcaagctcaacggctattgtggtgacatttttatgtttttcattgccaagttgcatccatgtttgattttctgatgagactagagtgacagtgtttcagaacccaaatgtcctcaggtagtttggagcatctctatgagatgggattatgcagatggcctatggaaaatgcagctgcataattaacacattatcaaagtcctcttacaatttattttccgcagcatgtcagctaagtagacccaatggggagagaaaatgcctgctttctttccctctttttctgcactgccatattcacccccaaccatccaatctgtggataattggatgttagcggtactcttccacttccgggcctggagcttggcttgtatccaagtgtatggttgctttgcttaagaggaatccctctatttcacctgttctggaggcaccagaccttgaaaagaacatgctcaaaataaaatgttatctgttatttttgtaaactcaaagttaagatgatcaaagttctaaaattccaagaatgtgcttttagacggtctcaatctaaaagcacttcaaggggtcaaagggcaaccagcttgggtgctacctcagtgttgtagtttctgatactttatgtctttgctcaccctcatccccaaactacttgaaaagggcatttggcaccactctctgaaacaacacagtcactctagcaaggcccccaaagggccctggttttacattacatttcaaactttatttgctttggggttttgtttctgttgttgttcaaatgcaaaaaaaaaaaaaaa

SEQ ID NO: 1185 - DNA, 390 bp, Artificial Sequence
  Description of Artificial sequences:primer
  misc_feature (1)..(390): 3' terminal sequence from clone image:509515. formin binding protein 3(FNBP3) gene.
gattcactaatatgcttggtcagcctggatcaactgcacttgatcttttcaagttttatgttgaggatcttaaagcacagttatcatgacgagaagaagataataaaagacattctaaaggataaaggatttgtagttgaagtaaacactacttttgaagattttgtggcgataatcagttcaactaaaagatcaactacattagatgctggaaatatcaaattggctttcaatagtttactagaaaaggcagaagccccgtgaaccgtgaaagagaaaaagaagaggctccggaagatgaaaccgaaaaagaatctgcatttaagagtatgttaaaacaagctgctcctccgatagaattggatgctgtctggggaagatatccgtgag

SEQ ID NO: 1186 - DNA, 224 bp, Artificial Sequence
  Description of Artificial sequences:primer
  misc_feature (1)..(224): 5' terminal sequence from clone image:509515. formin binding protein 3(FNBP3) gene.
agaatgttctgaagcagaacgagactctgatcgctgtctttttttctttgaatggctatcatcatcatctgaatctgaccccgatcgagagcgggaacgtttcctatgatgttttttagatttcttagaatgtttcttgttctttgaatgatgatgctgacattcatgctcaagcacatgcataaaatctttaaatatttcggttttctttcagattctagagt

SEQ ID NO: 1187 - DNA, 1954 bp, Artificial Sequence
  Description of Artificial sequences:primer
  misc_feature (1)..(1954): formin binding protein 3(FNBP3) gene.
gattcactaatatgcttggtcagcctggatcaactgcacttgatcttttcaagttttatgttgaggatcttaaagcacagttatcatgacgagaagaagataataaaagacattctaaaggataaaggatttgtagttgaagtaaacactacttttgaagattttgtggcgataatcagttcaactaaaagatcaactacattagatgctggaaatatcaaattggctttcaatagtttactagaaaaggcagaagccccgtgaaccgtgaaagagaaaaagaagaggctccggaagatgaaaccgaaaaagaatctgcatttaagagtatgttaaaacaagctgctcctccgatagaattggatgctgtctgggaagatatccgtgagagatttgtaaaagagccagcatttgaggacataactctagaatctgaaagaaaacgaatatttaaagattttatgcatgtgcttgagcatgaatgtcagcatcatcattcaaagaacaagaaacattctaagaaatctaaaaaacatcataggaaacgttcccgctctcgatcggggtcagattcagatgatgatgatagccattcaaagaaaaaaagacagcgatcagagtctcgttctgcttcagaacattcttctagtgcagagtctgagagaagttataaaaagtcaaaaaagcataagaagaaaagtaagaagaggagacataaatctgactctccagaatccgatgctgagcgagagaaggataaaaaagaaaaagatcgggaaagtgaaaaagacagaactagacaaagatcagaatcaaaacacaaatcgcctaagaaaaagactggaaaggattctggtaattgggatacttctggcagcgaactgagtgaaggggaattggaaaagcgcagaagaacccttttggagcaactggatgatgatcaataaattataccaaatatatgtttacagtatgatttaaagtctgattcagaccagggactctattttaagttcaactgaaataacactgggttttaattatatcacaggaaaaaaaaagtgcatttaagtattgttatcgtggactttataaaagcaaaggaaattgaaagtaacttttgattctgtatcaagaatcatattttcatacagtcataactgtctttctgtgaccctttcacagggcactgtaggatggattaaaggtggcaatttactgataactgcagatgtctctactttgttctaaaatctaagtcatgaggtgatttgatttactttatagaagctggattttgaagatctaatgaaaaattttttgataatatagtagtacaaaaaaagcaccagcaactgataaaaattgcttttttgtgcgctacccaactggttaaagccaatgtgatcttttatggtgaaactcctaagaaacaggtggttttgctggaaacttggtagacccttaattatagtggtgctaatgagcactactgtaatataaagccaccattatttttttatcaaacatctgaatacattttacaaaggctattgtgagggcattattttgagcatctattttgaggtgatgtttaaaaaaactttaacatcaaatcaaattgtaaattaatttaaatatattgccttaaggccctactaaagaatgtgccaccagactttaagtgatagttgcaatatccttgtctaaaaaaaaaaaaaaaagttgacttaaacattttctttaacagttgtcttttttttctaaattcagtctttctcttgcttttttttccctgctattgaggaagtattttgccttccctactcactgagaagtattgacttcgtggtacacattctaaagcatttctgatttgaatatttttgtacatttttatcaattattaaaccttctcttctagtgaaaaaaaaaaaaaaaaaaaaaaaaaaaa

SEQ ID NO: 1188 - DNA, 455 bp, Artificial Sequence
  Description of Artificial sequences:primer
  misc_feature (1)..(455): 3' terminal sequence from clone image:509584. guanine nucleotide binding protein (g protein), gamma 12(GNG12) gene.
tttttttcctcaccgtattccacatacctgtggctggggaaggtaatgttacctctgcaaacagatgctctggtaagagaagaaagacacagggaaggcagagagagcaagacagagggctcaatcacaaagctgggacaaggagagcagctgtttttcacacattcctgctcctctctcagctgggctcatgttcactccgtttcattccaatcatcagggtggagatttcagaggtgcctatccctaatccagtagagaacatgagccctgggagcacagctgcctggagtcctcccaagggtctcctccccttttccagactcagcatcattgaagccctaacgggtccttgtaaattaatgtttcatattatccgaaggactgtcagtttagtttggtacagtttattggtagcctaagaggtccagcaagatttcaagagaggagagatg

SEQ ID NO: 1189 - DNA, 592 bp, Artificial Sequence
  Description of Artificial sequences:primer
  misc_feature (1)..(592): guanine nucleotide binding protein (g protein), gamma 12(GNG12) gene.
ttcggcacagggccggagagcaagagcggggaggaggagaggtcggaatgtctccaggagcccttagagaccgagtcccggcggcgacggcggggcagcgcaccggcaggcggattcattccacttaaaacctgaaaacattggaccacacaaagtcttactgatttcaggtaaaaacaataattgaagatgtccagcaaaacagcaagcaccaacaatatagcccaggcaaggagaactgtgcagcagttaagattagaagcctccattgaaagaataaaggtttcgaaggcatcagcggacctcatgtcctactgtgaggaacatgccaggagtgaccctttgctgataggaataccaacttcagaaaaccctttcaaggataaaaaaacttgcatcatcttatagtggaatagagaaacagctcctcgcctcttcccaacaacgcaaatttatgagcagctccttgaagaagatttaccttcagcttattttggtaaccactgctaataactaaaatgttctcagcttggaataatggactctgagtctctattttccaagttgtcctttctccttaaaataccctttt

SEQ ID NO: 1190 - DNA, 430 bp, Artificial Sequence
  Description of Artificial sequences:primer
  misc_feature (1)..(430): 3' terminal sequence from clone image:509588. taf12 rna polymerase ii, tata box binding protein (tbp)-associated factor, 20kda(TAF12) gene.
gcaaatgaaagtcatattcatataaacactgacattacaaagtacagggaaaaggggaagggagaaggaaacaaaaccctttacaaatcctgctaatactgtcttacccaaaaagaccataatgctttgtcccatattcagtcacttatataataaaccacaaataaaatcttctctggaagatacattgctcctctttgagatggcagggaaaagggaccggaagttggggtaggaggctttattcttttggcagatcctctcagtcattatagatattgctgcactgttaataaaaaatatatgcttctctgtaaagcattaaaaaaaaaaatccaaggatggagatggctgagttctcagctccaagtatctccaaatacattgctgtccattccctgacctttccgtggtggtatttcttgggttg

SEQ ID NO: 1191 - DNA, 446 bp, Artificial Sequence
  Description of Artificial sequences:primer
  misc_feature (1)..(446): 5' terminal sequence from clone image:509588. taf12 rna polymerase ii, tata box binding protein (tbp)-associated factor, 20kda(TAF12) gene.
  misc_feature (134)..(134): n is a, c, g, or t
  misc_feature (257)..(257): n is a, c, g, or t
  misc_feature (264)..(264): n is a, c, g, or t
acgaacgcttcactggggcagtctctgcatatcatggggagatagacgctgctgcctttaattggccttggtcctcacagctccaaaaagaaacaggatctcgataagctctatgagctgaagtccaaagctcnggcagattatgaaccagtttggcccctcagccctaatcaacctctccaatttctcatccataaaaccggaaccagccagcacccctccacaaggctccatggccaatagtactgcaagtggtnaaagatnccaaggcactcctggggcaaggaggtcgtcttagcccttgaaaacaatcagggtatttgaccaagaagaaatttacagggactttagtaagagaagttggatccttaatggagcagtttggatgaagatgtggaggagatgctgctgcagattgctggatgatttttatccgagagtgtggt

SEQ ID NO: 1192 - DNA, 1113 bp, Artificial Sequence
  Description of Artificial sequences:primer
  misc_feature (1)..(1113): taf12 rna polymerase ii, tata box binding protein (tbp)-associated factor, 20kda(TAF12) gene.
ccgcgcagtcggaccggctgctgagacgaacgcttcactggggcagtctctgcatatcatggggagatagacgctgctgcctttaattggccttggtcctcacagctccaaaaagaaacaggatctcgataagctctatgagctgaagtccaaagctcggcagattatgaaccagtttggcccctcagccctaatcaacctctccaatttctcatccataaaaccggaaccagccagcacccctccacaaggctccatggccaatagtactgcagtggtaaagataccaggcactcctggggcaggaggtcgtcttagccctgaaaacaatcaggtattgaccaagaagaaattacaggacttagtaagagaagtggatcctaatgagcagttggatgaagatgtggaggagatgctgctgcagattgctgatgattttatcgagagtgtggtgacagcagcctgtcagcttgcgcggcatcgcaagtctagcaccctggaggtgaaagatgtccagctgcatttagagcgccagtggaacatgtggatcccaggatttggttctgaagaaatccgaccctacaaaaaagcttgcaccacagaagctcacaaacagagaatggcattgatccggaaaacaaccaagaaataacacacggaaaggtcagggaatggacagcaatgtatttggagatacttgagctgagaactcagccatctcatccttggatttttttttttaatgctttacagagaagcatatattttttattaacagtgcagcaatatctataatgactgagaggatctgccaaaagaataaagcctcctaccccaacttccggtcccttttccctgccatctcaaagaggagcaatgtatcttccagagaagattttatttgtggtttattatataagtgactgaatatgggacaaagcattatggtctttttgggtaagacagtattagcaggatttgtaaagggttttgtttccttctcccttcccccttttccctgtactttgtaatgtcagtgtttatatgaatatgactttcatttcatttgcttttccagaataaagaagttattaataaaaaaaaaaaaaaaaa

SEQ ID NO: 1193 - DNA, 421 bp, Artificial Sequence
  Description of Artificial sequences:primer
  misc_feature (1)..(421): 3' terminal sequence from clone image:509719. ribosomal protein l27a(RPL27A) gene.
  misc_feature (323)..(323): n is a, c, g, or t
  misc_feature (392)..(392): n is a, c, g, or t
tttttgaaaaagtagttagcatttaatgaaactccctccatgtggcttcaagcacaggacacaggcccccccaacactcttaatcttctcctcagctcttctgctgaagaatttggccttcacgatgacaggctgctttgggagctttccctttcccagaactttgtagtagcccgatcgcaccacatcaatgatgggagcagcccccgtcttgtttttagcagcattcacccgtgtctgttcactgaccaaagtccacaatttgtcaaggttgacagttgggcagaagctctggttcctctttaagtggtaatgcttcatancaacttttcccaaaagtagcctggggtgggtatttgtcgaagtttgatccggtgggtgatgcaagaccnacaggatttaccggcgggccgccgggggt

SEQ ID NO: 1194 - DNA, 137 bp, Artificial Sequence
  Description of Artificial sequences:primer
  misc_feature (1)..(137): 5' terminal sequence from clone image:509719. ribosomal protein l27a(RPL27A) gene.
  misc_feature (30)..(30): n is a, c, g, or t
  misc_feature (32)..(32): n is a, c, g, or t
  misc_feature (38)..(38): n is a, c, g, or t
  misc_feature (64)..(64): n is a, c, g, or t
ttaggggccacgtgagccacggccacggcncnagtagnaagcaccggaagcaccccggcggccncggtaatgctggtggtctgcatcaccaccggatcaacttcgacaaataccacccaggctactttgggaaaatt

SEQ ID NO: 1195 - DNA, 514 bp, Artificial Sequence
  Description of Artificial sequences:primer
  misc_feature (1)..(514): ribosomal protein l27a(RPL27A) gene.
ctttttcgtctgggctgccaacatgccatccagactgaggaagacccggaaacttaggggccacgtgagccacggccacggccgcataggcaagcaccggaagcaccccggcggccgcggtaatgctggtggtctgcatcaccaccggatcaacttcgacaaataccacccaggctactttgggaaagttggtatgaagcattaccacttaaagaggaaccagagcttctgcccaactgtcaaccttgacaaattgtggactttggtcagtgaacagacacgggtgaatgctgctaaaaacaagactggggctgctcccatcattgatgtggtgcgatcgggctactacaaagttctgggaaagggaaagctcccaaagcagcctgtcatcgtgaaggccaaattcttcagcagaagagctgaggagaagattaagagtgttgggggggcctgtgtcctggtggcttgaagccacatggagggagtttcattaaatgctaactacttttaaaaa

SEQ ID NO: 1196 - DNA, 429 bp, Artificial Sequence
  Description of Artificial sequences:primer
  misc_feature (1)..(429): 3' terminal sequence from clone image:509735. prohibitin(PHB) gene.
  misc_feature (254)..(254): n is a, c, g, or t
  misc_feature (425)..(425): n is a, c, g, or t
gaagtgattttacctttatttccttcactttaagccaatcatgaaatttcacagtgatttctggggtgggagcagaaggaaggctgtgttaagaatcatcggggctgtggccagtcagcccgcggaggtgcaggcagggtgggccctcactggggcagctggaggagcacggactgccccgctggcaggtaggtgatgttccgagagcgtgagagctggtacgcgatgtcctctgcagcttccagcttgcgcantccgatcaggccatcccctgcagtggccagtgagttggcaatcagctcagctgccttgggagtcgccctcagcagagatgatggccgcctttttcctgttgctcagccttttccaccacaaatctgggccctctctgcttcctggctgagccacctggtttgggcttccancgct

SEQ ID NO: 1197 - DNA, 119 bp, Artificial Sequence
  Description of Artificial sequences:primer
  misc_feature (1)..(119): 5' terminal sequence from clone image:509735. prohibitin(PHB) gene.
  misc_feature (114)..(114): n is a, c, g, or t
  misc_feature (117)..(117): n is a, c, g, or t
cagagtggaagcaggtgtgagagggtccagcagaaggaaacatggctgccaaagtgtttgagtccattggcaagtttggcctggccttagctgttgcaggaggcgtggttaacnctncc

SEQ ID NO: 1198 - DNA, 1826 bp, Artificial Sequence
  Description of Artificial sequences:primer
  misc_feature (1)..(1826): prohibitin(PHB) gene.
agtatgtgtggttggggaattcatgtggaggtcagagtggaagcaggtgtgagagggtccagcagaaggaaacatggctgccaaagtgtttgagtccattggcaagtttggcctggccttagctgttgcaggaggcgtggtgaactctgccttatataatgtggatgctgggcacagagctgtcatctttgaccgattccgtggagtgcaggacattgtggtaggggaagggactcattttctcatcccgtgggtacagaaaccaattatctttgactgccgttctcgaccacgtaatgtgccagtcatcactggtagcaaagatttacagaatgtcaacatcacactgcgcatcctcttccggcctgtcgccagccagcttcctcgcatcttcaccagcatcggagaggactatgatgagcgtgtgctgccgtccatcacaactgagatcctcaagtcagtggtggctcgctttgatgctggagaactaatcacccagagagagctggtctccaggcaggtgagcgacgaccttacagagcgagccgccacctttgggctcatcctggatgacgtgtccttgacacatctgaccttcgggaaggagttcacagaagcggtggaagccaaacaggtggctcagcaggaagcagagagggccagatttgtggtggaaaaggctgagcaacagaaaaaggcggccatcatctctgctgagggcgactccaaggcagctgagctgattgccaactcactggccactgcaggggatggcctgatcgagctgcgcaagctggaagctgcagaggacatcgcgtaccagctctcacgctctcggaacatcacctacctgccagcggggcagtccgtgctcctccagctgccccagtgagggcccaccctgcctgcacctccgcgggctgactgggccacagccccgatgattcttaacacagccttccttctgctcccaccccagaaatcactgtgaaatttcatgattggcttaaagtgaaggaaataaaggtaaaatcacttcagatctctaattagtctatcaaatgaaactctttcattcttctcacatccatctacttttttatccacctccctaccaaaaattgccaagtgcctatgcaaaccagctttaggtcccaattcggggcctgctggagttccggcctgggcaccagcatttggcagcacgcaggcggggcagtatgtgatggactggggagcacaggtgtctgcctagatccacgtgtggcctccgtcctgtcactgatggaaggtttgcggatgagggcatgtgcggctgaactgagaaggcaggcctccgtcttcccagcggttcctgtgcagatgctgctgaagagaggtgccggggaggggcagagaggaagtggtctgtctgttaccataagtctgattctctttaactgtgtgaccagcggaaacaggtgtgtgtgaactgggcacagattgaagaatctgcccctgttgaggtgggtgggcctgactgttgccccccagggtcctaaaacttggatggacttgtatagtgagagaggaggcctggaccgagatgtgagtcctgttgaagacttcctctctaccccccaccttggtccctctcagatacccagtggaattccaacttgaaggattgcatcctgctggggctgaacatgcctgccaaagacgtgtccgacctacgttcctggccccctcgttcagagactgcccttctcacgggctctatgcctgcactgggaaggaaacaaatgtgtataaactgctgtcaataaatgacacccagaccttcc

SEQ ID NO: 1199 - DNA, 512 bp, Artificial Sequence
  Description of Artificial sequences:primer
  misc_feature (1)..(512): 3' terminal sequence from clone image:509751. splicing factor, arginine/serine-rich 9(SFRS9) gene.
  misc_feature (39)..(39): n is a, c, g, or t
  misc_feature (327)..(327): n is a, c, g, or t
  misc_feature (498)..(499): n is a, c, g, or t
tttttttttactaaacatttaaaatatatttctaaacanaatgggccgactcagtcacagtaactgttgatctccatagtagagcaacccacaaagacagaactgatttttttcccataatcaggggtgaaaaatatacaacttgtttctgaaccaaaaccacaatttctgcagtttaaaatgtttcactgctaatatggccctggtagaaattatgtagttttttttcttctttaaaaaaaaaaaaattaaaaaaatttcctaagacactaaatcctcaatctggaatgtagattctgagcacaaagcagctcagttaacctaaanaataaagaaaaaattcccatcacctgtctcagtagggcctgaaaggagagaagtagtgtggggaaccctggctttggtatggagagtcacggccccttgacccagaccgagaccgtgagtagccatagctggtgcttctcctcaggataactcgggatgtaggaagtttcnncctcatgagagcg

SEQ ID NO: 1200 - DNA, 1069 bp, Artificial Sequence
  Description of Artificial sequences:primer
  misc_feature (1)..(1069): splicing factor, arginine/serine-rich 9(SFRS9) gene.
ggcggcggcggcgacgtgggctgcggcgggcccgcggcgtcgggcggtgcggatgtcgggctgggcggacgagcgcggcggcgagggcgacgggcgcatctacgtggggaaccttccgaccgacgtgcgcgagaaggacttggaggacctgttctacaagtacggccgcatccgcgagatcgagctcaagaaccggcacggcctcgtgcccttcgccttcgtgcgcttcgaggacccccgagatgcagaggatgctatttatggaagaaatggttatgattatggccagtgtcggcttcgtgtggagttccccaggacttatggaggtcggggtgggtggccccgtggtgggaggaatgggcctcctacaagaagatctgatttccgagttcttgtttcaggacttcctccgtcaggcagctggcaggacctgaaggatcacatgcgagaagctggggatgtctgttatgctgatgtgcagaaggatggagtggggatggtcgagtatctcagaaaagaagacatggaatatgccctgcgtaaactggatgacaccaaattccgctctcatgagggtgaaacttcctacatccgagtttatcctgagagaagcaccagctatggctactcacggtctcggtctgggtcaaggggccgtgactctccataccaaagcaggggttccccacactacttctctcctttcaggccctactgagacaggtgatgggaattttttctttattttttaggttaactgagctgctttgtgctcagaatctacattccagattgaggatttagtgtcttaggaaatttttttaattttttttttttaaagaagaaaaaaaactacataatttctaccagggccatattagcagtgaaacattttaaactgcagaaattgtggttttggttcagaaacaagttgtatatttttcacccctgattatgggaaaaaatcgttctgtctttgtggggttcgctctactatggagatcaacagttactgtgactgagtcggcccattctgtttagaaatatattttaaatgtttagtaattga

SEQ ID NO: 1201 - DNA, 326 bp, Artificial Sequence
  Description of Artificial sequences:primer
  misc_feature (1)..(326): 3' terminal sequence from clone image:509887. non-pou domain containing, octamer-binding(NONO) gene.
  misc_feature (275)..(275): n is a, c, g, or t
  misc_feature (301)..(301): n is a, c, g, or t
  misc_feature (313)..(313): n is a, c, g, or t
  misc_feature (318)..(318): n is a, c, g, or t
tttttttttttttttaccacacagaattgacttgtttaataccacccctcccttgccctctgcctccagcatactccctagagtagtacaggcagggtagatctaactattggaaggaatccctaacacttttccagggtagaattctggctagtccaaaaagggtccttcttttaagggttttgagaaactagacactgcaacttattagtatcggcgacgtttgtttggggcaaattcagctccaggagctgcacgggttgaatgcaggaggnagttccaccaattgccccaattcccntccatttggtangcaanccttgacc

SEQ ID NO: 1202 - DNA, 156 bp, Artificial Sequence
  Description of Artificial sequences:primer
  misc_feature (1)..(156): 5' terminal sequence from clone image:509887. non-pou domain containing, octamer-binding(NONO) gene.
ggccgtcgtagcgtcgccgttactccgaggagataccagtcggtagaggggtgcaaaaatgcagagtaataaaacttttaacttggagaagcaaaaccatactccaagaaagcatcatcaacatcaccaccagcagcagcaccaccagcagcaaca

SEQ ID NO: 1203 - DNA, 2690 bp, Artificial Sequence
  Description of Artificial sequences:primer
  misc_feature (1)..(2690): non-pou domain containing, octamer-binding(NONO) gene.
gctcttttctcgggacgggagaggccgtgtagcgtcgccgttactccgaggagataccagtcggtagaggagaagtcgaggttagagggaactgggaggcactttgctgtctgcaatcgaagttgagggtgcaaaaatgcagagtaataaaacttttaacttggagaagcaaaaccatactccaagaaagcatcatcaacatcaccaccagcagcagcaccaccagcagcaacagcagcagccgccaccaccgccaatacctgcaaatgggcaacaggccagcagccaaaatgaaggcttgactattgacctgaagaattttagaaaaccaggagagaagaccttcacccaacgaagccgtctttttgtgggaaatcttcctcccgacatcactgaggaagaaatgaggaaactatttgagaaatatggaaaggcaggcgaagtcttcattcataaggataaaggatttggctttatccgcttggaaacccgaaccctagcggagattgccaaagtggagctggacaatatgccactccgtggaaagcagctgcgtgtgcgctttgcctgccatagtgcatcccttacagttcgaaaccttcctcagtatgtgtccaacgaactgctggaagaagccttttctgtgtttggccaggtagagagggctgtagtcattgtggatgatcgaggaaggccctcaggaaaaggcattgttgagttctcagggaagccagctgctcggaaagctctggacagatgcagtgaaggctccttcctgctaaccacatttcctcgtcctgtgactgtggagcccatggaccagttagatgatgaagagggacttccagagaagctggttataaaaaaccagcaatttcacaaggaacgagagcagccacccagatttgcacagcctggctcctttgagtatgaatatgccatgcgctggaaggcactcattgagatggagaagcagcagcaggaccaagtggaccgcaacatcaaggaggctcgtgagaagctggagatggagatggaagctgcacgccatgagcaccaggtcatgctaatgagacaggatttgatgaggcgccaagaagaacttcggaggatggaagagctgcacaaccaagaggtgcaaaaacgaaagcaactggagctcaggcaggaggaagagcgcaggcgccgtgaagaagagatgcggcggcacgaagaagaaatgatgcggcgacacgaggaaggattcaagggaaccttccctgatgcgagagagcaggagattcggatgggtcagatggctatgggaggtgctatgggcataaacaacagaggtgccatgccccctgctcctgtgccagctggtaccccagctcctccaggacctgccactatgatgccggatggaactttgggattgaccccaccaacaactgaacgctttggtcaggctgctacaatggaaggaattggggcaattggtggaactcctcctgcattcaaccgtgcagctcctggagctgaatttgccccaaacaaacgtcgccgatactaataagttgcagtgtctagtttctcaaaacccttaaaagaaggaccctttttggactagccagaattctaccctggaaaagtgttagggattccttccaatagttagatctaccctgcctgtactactctaagggattccttccaatagttagatctaccctgcctgtactactctagggagtatgctggaggcagagggcaagggaggggtggtattaaacaatgcaattctgtgtggtatattgtttaatcagttctgtgtggtgcattcctgaagtctctaatgtgactgttgagggcctggggaaaccatggcaaagtggatccagttagagcccattaatcttgatcattccggttttttttttttttgtccatcttgtttcatttgcttgccccgcccccgagacggagtcttactctgtcgcccaggctggagtgtagtggcatgatctcggctcactgcaatctctgcctcccgggttcaagcttgtccaggttgatcttgaactcctgacctcgtgatctacccacctcggtctcccaaaatgctgggattacaggggtgagccaccgtgcccaacctcacttgcttcttatccttacactcccccagccccagagaaactgccacatacaccacaaaaaccaaacatgccccaatgaccttagccccattgctccattcactcccaggtgagaattcaggcaaacgtccacaaaggtcacaggcagcgtacatacggttctgttataccccatatattaccccttcatgtcctaaagaagacattttctcttagagattttcattttagtgtatctttaaaaaaaaaatcttgtgttaacttgcctccatctttttcttggggtgagggacaccagggaatgacccttttgtgtctatgatgttgctgttcacagcttttcttgataggcctagtacaatcttgggaacagggttactgtatactgaaggtctgacagtagctcttagactcgcctatcttaggtagtcatgctgtgcattttttttttcattggtgtactgtgtttgatttgtctcatatatttggagtttttctgaaaaatggagcagtaatgcagcatcaacctattaaaatacttttaagcctttt

SEQ ID NO: 1204 - DNA, 416 bp, Artificial Sequence
  Description of Artificial sequences:primer
  misc_feature (1)..(416): 3' terminal sequence from clone image:510130. cadherin 17, li cadherin (liver-intestine)(CDH17) gene.
  misc_feature (15)..(15): n is a, c, g, or t
atacaaccagcgtanattcttgatatgtgaccatatattacatgtcttgttcccccccacatgttaaatatataataaccaaaactttactaacatacgaatgaagaaaacatgcgcagcatgtatgcatggcaggtagtgaggaaatctggccagccgactggttcctttaccaaggtttgcagagtaggttgtgtttgaacaccttctgtgggtctgtgtcatttccaagttgaagaatttcagccaaagagcaacatgtcacattgattaaagatggttaatgacacagaaacatttctgttaatactaagggaaaaggctgttcttttatttatttatttttgctgagtcctcacgtttttcttctctgacaaatgtttgaaattcagtgaaataccaaaggagtcaaggat

SEQ ID NO: 1205 - DNA, 403 bp, Artificial Sequence
  Description of Artificial sequences:primer
  misc_feature (1)..(403): 5' terminal sequence from clone image:510130. cadherin 17, li cadherin (liver-intestine)(CDH17) gene.
agtaaccgtatttgaggtccaggagaatgaacgactgggtaacagtatcgggacccttactgcacatgacagggatgaagaaaatactgccaacagttttctaaactacaggattgtggagcaaactcccaaacttcccatggatggactcttcctaatccaaacctatgctggaatgttacagttagctaaacagtccttgaagaagcaagatactcctcagtacaacttaaccgatagaggtgtctgacaaagatttcaagaccctttgttttgtgcaaatcaacgttattgatatcaatgatcagatccccatctttgaaaaatcagattatggaaacctgactcttgctgaagacacaaacattgggtccaccatcttaaccatccaggccactgatgc

SEQ ID NO: 1206 - DNA, 3697 bp, Artificial Sequence
  Description of Artificial sequences:primer
  misc_feature (1)..(3697): cadherin 17, li cadherin (liver-intestine)(CDH17) gene.
agggagtgttcccgggggagatactccagtcgtagcaagagtctcgaccactgaatggaagaaaaggacttttaaccaccattttgtgacttacagaaaggaatttgaataaagaaaactatgatacttcaggcccatcttcactccctgtgtcttcttatgctttatttggcaactggatatggccaagaggggaagtttagtggacccctgaaacccatgacattttctatttatgaaggccaagaaccgagtcaaattatattccagtttaaggccaatcctcctgctgtgacttttgaactaactggggagacagacaacatatttgtgatagaacgggagggacttctgtattacaacagagccttggacagggaaacaagatctactcacaatctccaggttgcagccctggacgctaatggaattatagtggagggtccagtccctatcaccatagaagtgaaggacatcaacgacaatcgacccacgtttctccagtcaaagtacgaaggctcagtaaggcagaactctcgcccaggaaagcccttcttgtatgtcaatgccacagacctggatgatccggccactcccaatggccagctttattaccagattgtcatccagcttcccatgatcaacaatgtcatgtactttcagatcaacaacaaaacgggagccatctctcttacccgagagggatctcaggaattgaatcctgctaagaatccttcctataatctggtgatctcagtgaaggacatgggaggccagagtgagaattccttcagtgataccacatctgtggatatcatagtgacagagaatatttggaaagcaccaaaacctgtggagatggtggaaaactcaactgatcctcaccccatcaaaatcactcaggtgcggtggaatgatcccggtgcacaatattccttagttgacaaagagaagctgccaagattcccattttcaattgaccaggaaggagatatttacgtgactcagcccttggaccgagaagaaaaggatgcatatgttttttatgcagttgcaaaggatgagtacggaaaaccactttcatatccgctggaaattcatgtaaaagttaaagatattaatgataatccacctacatgtccgtcaccagtaaccgtatttgaggtccaggagaatgaacgactgggtaacagtatcgggacccttactgcacatgacagggatgaagaaaatactgccaacagttttctaaactacaggattgtggagcaaactcccaaacttcccatggatggactcttcctaatccaaacctatgctggaatgttacagttagctaaacagtccttgaagaagcaagatactcctcagtacaacttaacgatagaggtgtctgacaaagatttcaagaccctttgttttgtgcaaatcaacgttattgatatcaatgatcagatccccatctttgaaaaatcagattatggaaacctgactcttgctgaagacacaaacattgggtccaccatcttaaccatccaggccactgatgctgatgagccatttactgggagttctaaaattctgtatcatatcataaagggagacagtgagggacgcctgggggttgacacagatccccataccaacaccggatatgtcataattaaaaagcctcttgattttgaaacagcagctgtttccaacattgtgttcaaagcagaaaatcctgagcctctagtgtttggtgtgaagtacaatgcaagttcttttgccaagttcacgcttattgtgacagatgtgaatgaagcacctcaattttcccaacacgtattccaagcgaaagtcagtgaggatgtagctataggcactaaagtgggcaatgtgactgccaaggatccagaaggtctggacataagctattcactgaggggagacacaagaggttggcttaaaattgaccacgtgactggtgagatctttagtgtggctccattggacagagaagccggaagtccatatcgggtacaagtggtggccacagaagtaggggggtcttccttgagctctgtgtcagagttccacctgatccttatggatgtgaatgacaaccctcccaggctagccaaggactacacgggcttgttcttctgccatcccctcagtgcacctggaagtctcattttcgaggctactgatgatgatcagcacttatttcggggtccccattttacattttccctcggcagtggaagcttacaaaacgactgggaagtttccaaaatcaatggtactcatgcccgactgtctaccaggcacacagagtttgaggagagggagtatgtcgtcttgatccgcatcaatgatgggggtcggccacccttggaaggcattgtttctttaccagttacattctgcagttgtgtggaaggaagttgtttccggccagcaggtcaccagactgggatacccactgtgggcatggcagttggtatactgctgaccacccttctggtgattggtataattttagcagttgtgtttatccgcataaagaaggataaaggcaaagataatgttgaaagtgctcaagcatctgaagtcaaacctctgagaagctgaatttgaaaaggaatgtttgaatttatatagcaagtgctatttcagcaacaaccatctcatcctattacttttcatctaacgtgcattataattttttaaacagatattccctcttgtcctttaatatttgctaaatatttcttttttgaggtggagtcttgctctgtcgcccaggctggagtacagtggtgtgatcccagctcactgcaacctccgcctcctgggttcacatgattctcctgcctcagcttcctaagtagctgggtttacaggcacccaccaccatgcccagctaatttttgtatttttaatagagacggggtttcgccatttggccaggctggtcttgaactcctgacgtcaagtgatctgcctgccttggtctcccaatacaggcatgaaccactgcacccacctacttagatatttcatgtgctatagacattagagagatttttcatttttccatgacatttttcctctctgcaaatggcttagctacttgtgtttttcccttttggggcaagacagactcattaaatattctgtacattttttctttatcaaggagatatatcagtgttgtctcatagaactgcctggattccatttatgttttttctgattccatcctgtgtccccttcatccttgactcctttggtatttcactgaatttcaaacatttgtcagagaagaaaaacgtgaggactcaggaaaaataaataaataaaagaacagccttttcccttagtattaacagaaatgtttctgtgtcattaaccatctttaatcaatgtgacatgttgctctttggctgaaattcttcaacttggaaatgacacagacccacagaaggtgttcaaacacaacctactctgcaaaccttggtaaaggaaccagtcagctggccagatttcctcactacctgccatgcatacatgctgcgcatgttttcttcattcgtatgttagtaaagttttggttattatatatttaacatgtggaagaaaacaagacatgaaaagagtggtgacaaatcaagaataaacactggttgtagtcagttttgtttgttaa

SEQ ID NO: 1207 - DNA, 341 bp, Artificial Sequence
  Description of Artificial sequences:primer
  misc_feature (1)..(341): 3' terminal sequence from clone image:510161. chaperonin containing tcp1, subunit 5 (epsilon)(CCT5) gene.
  misc_feature (315)..(315): n is a, c, g, or t
  misc_feature (321)..(321): n is a, c, g, or t
ttttttttttttttatggttaccaaacagctatttttattatagcatctacagtgtctggaaaaggatgtaacaataaataactgtagacgcatcacgagacatccatttacttaatcacagaagtggatcttgctacatagttttctcaatgtcttcattcttcagattctccaggcttacgaatgtcatcaatcttcaaaatcattctaaccatttgtgttgcaagagatatctgttgctttttgccaatcaaggtttctatgacatgctgttgcttcatatcatttgtccccttgtgcaaacagtccggatnggcccngaataacttggggattggca

SEQ ID NO: 1208 - DNA, 1961 bp, Artificial Sequence
  Description of Artificial sequences:primer
  misc_feature (1)..(1961): chaperonin containing tcp1, subunit 5 (epsilon)(CCT5) gene.
ggcacgagggccctcccgagaaagggaagtgcattctcgcttccgtagcggtctccgccggttgggggaaagtaattccggctgttgcaccatggcgtccatggggaccctcgccttcgatgaatatgggcgccctttcctcatcatcaaggatcaggaccgcaagtcccgtcttatgggacttgaggccctcaagtctcatataatggcagcaaaggctgtagcaaatacaatgagaacatcacttggaccaaatgggcttgataagatgatggtggataaggatggggatgtgactgtaactaatgatggggccaccatcttaagcatgatggatgttgatcatcagattgccaagctgatggtggaactgtccaagtctcaggatgatgaaattggagatggaaccacaggagtggttgtcctggctggtgccttgttagaagaagcggagcaattgctagaccgaggcattcacccaatcagaatagccgatggctatgagcaggctgctcgcgttgctattgaacacctggacaagatcagcgatagcgtccttgttgacataaaggacaccgaacccctgattcagacagcaaaaaccacgctgggctccaaagtggtcaacagttgtcaccgacagatggctgagattgctgtgaatgccgtcctcactgtagcagatatggagcggagagacgttgactttgagcttatcaaagtagaaggcaaagtgggcggcaggctggaggacactaaactgattaagggcgtgattgtggacaaggatttcagtcacccacagatgccaaaaaaagtggaagatgcgaagattgcaattctcacatgtccatttgaaccacccaaaccaaaaacaaagcataagctggatgtgacctctgtcgaagattataaagcccttcagaaatacgaaaaggagaaatttgaagagatgattcaacaaattaaagagactggtgctaacctagcaatttgtcagtggggctttgatgatgaagcaaatcacttacttcttcagaacaacttgcctgcggttcgctgggtaggaggacctgaaattgagctgattgccatcgcaacaggagggcggatcgtccccaggttctcagagctcacagccgagaagctgggctttgctggtcttgtacaggagatctcatttgggacaactaaggataaaatgctggtcatcgagcagtgtaagaactccagagctgtaaccatttttattagaggaggaaataagatgatcattgaggaggcgaaacgatcccttcacgatgctttgtgtgtcatccggaacctcatccgcgataatcgtgtggtgtatggaggaggggctgctgagatatcctgtgccctggcagttagccaagaggcggataagtgccccaccttagaacagtatgccatgagagcgtttgccgacgcactggaggtcatccccatggccctctctgaaaacagtggcatgaatcccatccagactatgaccgaagtccgagccagacaggtgaaggagatgaaccctgctcttggcatcgactgtttgcacaaggggacaaatgatatgaagcaacagcatgtcatagaaaccttgattggcaaaaagcaacagatatctcttgcaacacaaatggttagaatgattttgaagattgatgacattcgtaagcctggagaatctgaagaatgaagacattgagaaaactatgtagcaagatccacttctgtgattaagtaaatggatgtctcgtgatgcgtctacagttatttattgttacatccttttccagacactgtagatgctataataaaaatagctgtttggtaaccatagtttcacttgttcaaagctgtgtaatcgtgggggtactatctcaactgcttttgtattcattgtattaaaagaatctgtttaaaaaaaaaaaaaaaaaaaa

SEQ ID NO: 1209 - DNA, 268 bp, Artificial Sequence
  Description of Artificial sequences:primer
  misc_feature (1)..(268): 3' terminal sequence from clone image:510231. ribonucleotide reductase m2 polypeptide(RRM2) gene.
cacccctcactttaaagccaagactgccattgtcactgctatggtaagtcacagccagccaggccttctggaaaaggtgatactaccagcactataaacagacaggactggttgtgaggtagctacacagttttaaagatgctgttaatgaacattacggacaattcatgggtgtggctagttgggtaacacttccagctggatttttcttatgagatggaaaaaaaaaatcagccaagtaagggcacatcttcagttcatttaagaa

SEQ ID NO: 1210 - DNA, 295 bp, Artificial Sequence
  Description of Artificial sequences:primer
  misc_feature (1)..(295): 5' terminal sequence from clone image:510231. ribonucleotide reductase m2 polypeptide(RRM2) gene.
  misc_feature (89)..(89): n is a, c, g, or t
  misc_feature (167)..(167): n is a, c, g, or t
  misc_feature (185)..(185): n is a, c, g, or t
  misc_feature (196)..(196): n is a, c, g, or t
  misc_feature (240)..(240): n is a, c, g, or t
  misc_feature (245)..(245): n is a, c, g, or t
  misc_feature (254)..(254): n is a, c, g, or t
  misc_feature (256)..(256): n is a, c, g, or t
  misc_feature (264)..(264): n is a, c, g, or t
  misc_feature (276)..(276): n is a, c, g, or t
  misc_feature (286)..(286): n is a, c, g, or t
  misc_feature (288)..(288): n is a, c, g, or t
  misc_feature (290)..(290): n is a, c, g, or t
ccatgccgtcctgtcctggctgctcgctctgcttcgctgcgcctccactatgctctccctccgtgtcccgctcgcgcccatcacggacncgcagcagctgcagctctcgccgctgaaggggctcagcttggtcgacaaggagaacacgccgccggcctgagcggganccggtcctggccagcaanaccgcgatganggatcttccaggagcccacggagccgaaaactaaatgcagctgnccccnggagtggangnagtgatgncgctgctgagangaaaaccccngncngcttt

SEQ ID NO: 1211 - DNA, 2500 bp, Artificial Sequence
  Description of Artificial sequences:primer
  misc_feature (1)..(2500): ribonucleotide reductase m2 polypeptide(RRM2) gene.
cccaggcgcagccaatgggaagggtcggaggcatggcacagccaatgggaagggccggggcaccaaagccaatgggaagggccgggagcgcgcggcgcgggagatttaaaggctgctggagtgaggggtcgcccgtgcaccctgtcccagccgtcctgtcctggctgctcgctctgcttcgctgcgcctccactatgctctccctccgtgtcccgctcgcgcccatcacggacccgcagcagctgcagctctcgccgctgaaggggctcagcttggtcgacaaggagaacacgccgccggccctgagcgggacccgcgtcctggccagcaagaccgcgaggaggatcttccaggagcccacggagccgaaaactaaagcagctgcccccggcgtggaggatgagccgctgctgagagaaaacccccgccgctttgtcatcttccccatcgagtaccatgatatctggcagatgtataagaaggcagaggcttccttttggaccgccgaggaggttgacctctccaaggacattcagcactgggaatccctgaaacccgaggagagatattttatatcccatgttctggctttctttgcagcaagcgatggcatagtaaatgaaaacttggtggagcgatttagccaagaagttcagattacagaagcccgctgtttctatggcttccaaattgccatggaaaacatacattctgaaatgtatagtcttcttattgacacttacataaaagatcccaaagaaagggaatttctcttcaatgccattgaaacgatgccttgtgtcaagaagaaggcagactgggccttgcgctggattggggacaaagaggctacctatggtgaacgtgttgtagcctttgctgcagtggaaggcattttcttttccggttcttttgcgtcgatattctggctcaagaaacgaggactgatgcctggcctcacattttctaatgaacttattagcagagatgagggtttacactgtgattttgcttgcctgatgttcaaacacctggtacacaaaccatcggaggagagagtaagagaaataattatcaatgctgttcggatagaacaggagttcctcactgaggccttgcctgtgaagctcattgggatgaattgcactctaatgaagcaatacattgagtttgtggcagacagacttatgctggaactgggttttagcaaggttttcagagtagagaacccatttgactttatggagaatatttcactggaaggaaagactaacttctttgagaagagagtaggcgagtatcagaggatgggagtgatgtcaagtccaacagagaattcttttaccttggatgctgacttctaaatgaactgaagatgtgcccttacttggctgattttttttttccatctcataagaaaaatcagctgaagtgttaccaactagccacaccatgaattgtccgtaatgttcattaacagcatctttaaaactgtgtagctacctcacaaccagtcctgtctgtttatagtgctggtagtatcaccttttgccagaaggcctggctggctgtgacttaccatagcagtgacaatggcagtcttggctttaaagtgaggggtgaccctttagtgagcttagcacagcgggattaaacagtcctttaaccagcacagccagttaaaagatgcagcctcactgcttcaacgcagattttaatgtttacttaaatataaacctggcactttacaaacaaataaacattgttttgtactcacggcggcgataatagcttgatttatttggtttctacaccaaatacattctcctgaccactaatgggagccaattcacaattcactaagtgactaaagtaagttaaacttgtgtagactaagcatgtaatttttaagttttattttaatgaattaaaatatttgttaaccaactttaaagtcagtcctgtgtatacctagatattagtcagttggtgccagatagaagacaggttgtgtttttatcctgtggcttgtgtagtgtcctgggattctctgccccctctgagtagagtgttgtgggataaaggaatctctcagggcaaggagcttcttaagttaaatcactagaaatttaggggtgatctgggccttcatatgtgtgagaagccgtttcattttatttctcactgtattttcctcaacgtctggttgatgagaaaaaattcttgaagagttttcatatgtgggagctaaggtagtattgtaaaatttcaagtcatccttaaacaaaatgatccacctaagatcttgcccctgttaagtggtgaaatcaactagaggtggttcctacaagttgttcattctagttttgtttggtgtaagtaggttgtgtgagttaattcatttatatttactatgtctgttaaatcagaaattttttattatctatgttcttctagattttacctgtagttcataaaaaaaaaaaaaaaaaaaaaaaaa

SEQ ID NO: 1212 - DNA, 320 bp, Artificial Sequence
  Description of Artificial sequences:primer
  misc_feature (1)..(320): 3' terminal sequence from clone image:510235. enolase 1, (alpha)(ENO1) gene.
  misc_feature (82)..(82): n is a, c, g, or t
ttttttttttttttttttttttctcatgggtcactgaggctttttattttgagcacaaaaccaccggggatctagcctgtgncaccccggagatgacacgaggctcacatgactctagacacttggtggaaagtgaggcgagaaaaacaatgacttgggccaattacacgactgcaaagctagagctgccaacagggctccagggagcttggcttctgtagaagttctaaggaagcggtacgaactccacggcggtggggcgctaactagcagggacccctgcaagtgttggtcgggggcctcgagctgcctgagctggg

SEQ ID NO: 1213 - DNA, 398 bp, Artificial Sequence
  Description of Artificial sequences:primer
  misc_feature (1)..(398): 5' terminal sequence from clone image:510235. enolase 1, (alpha)(ENO1) gene.
gagcacggagatctcgccggctttacgttcacctcggtgtctgcagcaccctccgcttcctctcctaggcgacgagacccagtggctagaagttcaccatgtctattctcaagatccatgccagggagatctttgactctcgcgggaatcccactgttgaggttgatctcttcacctcaaaaggtctcttcagagctgctgtgcccagtggtgcttcaactggtatctatgaggccctagagctccgggacaatgataagactcgctatatggggaagggtgtctcaaaggctgttgagcacatcaataaaactattgcgcctgccctggtttagcaagaaactgaacgtcacagaacaagagaagattgacaaactgatgatcgagatggatggaac

SEQ ID NO: 1214 - DNA, 1812 bp, Artificial Sequence
  Description of Artificial sequences:primer
  misc_feature (1)..(1812): enolase 1, (alpha)(ENO1) gene.
tagctaggcaggaagtcggcgcgggcggcgcggacagtatctgtgggtacccggagcacggagatctcgccggctttacgttcacctcggtgtctgcagcaccctccgcttcctctcctaggcgacgagacccagtggctagaagttcaccatgtctattctcaagatccatgccagggagatctttgactctcgcgggaatcccactgttgaggttgatctcttcacctcaaaaggtctcttcagagctgctgtgcccagtggtgcttcaactggtatctatgaggccctagagctccgggacaatgataagactcgctatatggggaagggtgtctcaaaggctgttgagcacatcaataaaactattgcgcctgccctggttagcaagaaactgaacgtcacagaacaagagaagattgacaaactgatgatcgagatggatggaacagaaaataaatctaagtttggtgcgaacgccattctgggggtgtcccttgccgtctgcaaagctggtgccgttgagaagggggtccccctgtaccgccacatcgctgacttggctggcaactctgaagtcatcctgccagtcccggcgttcaatgtcatcaatggcggttctcatgctggcaacaagctggccatgcaggagttcatgatcctcccagtcggtgcagcaaacttcagggaagccatgcgcattggagcagaggtttaccacaacctgaagaatgtcatcaaggagaaatatgggaaagatgccaccaatgtgggggatgaaggcgggtttgctcccaacatcctggagaataaagaaggcctggagctgctgaagactgctattgggaaagctggctacactgataaggtggtcatcggcatggacgtagcggcctccgagttcttcaggtctgggaagtatgacctggacttcaagtctcccgatgaccccagcaggtacatctcgcctgaccagctggctgacctgtacaagtccttcatcaaggactacccagtggtgtctatcgaagatccctttgaccaggatgactggggagcttggcagaagttcacagccagtgcaggaatccaggtagtgggggatgatctcacagtgaccaacccaaagaggatcgccaaggccgtgaacgagaagtcctgcaactgcctcctgctcaaagtcaaccagattggctccgtgaccgagtctcttcaggcgtgcaagctggcccaggccaatggttggggcgtcatggtgtctcatcgttcgggggagactgaagataccttcatcgctgacctggttgtggggctgtgcactgggcagatcaagactggtgccccttgccgatctgagcgcttggccaagtacaaccagctcctcagaattgaagaggagctgggcagcaaggctaagtttgccggcaggaacttcagaaaccccttggccaagtaagctgtgggcaggcaagcccttcggtcacctgttggctacacagacccctcccctcgtgtcagctcaggcagctcgaggcccccgaccaacacttgcaggggtccctgctagttagcgccccaccgccgtggagttcgtaccgcttccttagaacttctacagaagccaagctccctggagccctgttggcagctctagctttgcagtcgtgtaattggcccaagtcattgtttttctcgcctcactttccaccaagtgtctagagtcatgtgagcctcgtgtcatctccggggtggccacaggctagatccccggtggttttgtgctcaaaataaaaagcctcagtgacccatgag

SEQ ID NO: 1215 - DNA, 445 bp, Artificial Sequence
  Description of Artificial sequences:primer
  misc_feature (1)..(445): 3' terminal sequence from clone image:510354. hypothetical protein dkfzp564b1023(DKFZP564B1023) gene.
ggctgggtcttctacccacaaaataatctgacgtacattggcacaaggtaggttcttttctccagtgataattctcacaggattatgcagaagctggcttgctagctgttctatgctagttggaattgtggctgaaaccaaaatggtctgacaatcattaggaatgttttccaaaatgtcaagcacttgttgttgaaaacccatctttaacatggtatcagcttcatctactaccacaatctttacaccacagagttctacagagctctgctttattatatccagaagtcgcccaggggttgctatgataaccttaacatgttgttgcagacgataaagctgtgggggtaagggtaagccccctacaagaagcacagttttcatgcgtggcaggccactcatcaattctttagcttgtctctctatctgaatggctaactctctg

SEQ ID NO: 1216 - DNA, 353 bp, Artificial Sequence
  Description of Artificial sequences:primer
  misc_feature (1)..(353): 5' terminal sequence from clone image:510354. hypothetical protein dkfzp564b1023(DKFZP564B1023) gene.
  misc_feature (236)..(236): n is a, c, g, or t
  misc_feature (343)..(343): n is a, c, g, or t
caagaaaagcagctgtttttcctgttatcatgcgagctttattcgagagcaaaactccatctgcgctcattcttacaccaaccagagagttagccattcagatagagagacaagctaaagaattgatgagtggcctgccagcatgaaaactgtgcttcttgtagggggcttacccttacccccacagctttatcgtctgcaacaacattgttaaggttatcatagcaaccccatgngcgacattctggatataataaagcagagtctgtagaactctgtggtgtaaagattgtcggtagtagatgaagctggataccatgttaaagatgggttttcaacaacnagtgcttgac

SEQ ID NO: 1217 - DNA, 2905 bp, Artificial Sequence
  Description of Artificial sequences:primer
  misc_feature (1)..(2905): hypothetical protein dkfzp564b1023(DKFZP564B1023) gene.
gggggctccgctccgcaccaccaaccccgggccgcagtcctgacgagcgggtcagggcttgtcgggcggaagcctggcctggagcctggaagggggagacggcccgagcgggagcgggagcggacgcggcctcagtcctgcgcggaatattgaaggatgtttgttccaagatctctaaaaatcaagaggaatgctaatgatgatggcaaaagttgtgtggctaagataattaaaccagacccagaagaccttcagttggacaaaagcagagatgttcccgttgatgctgtagctacagaagcagccacaatagacaggcacatcagcgaatcatgccctttccccagcccaggtggccagttggcagaggttcattcagtaagtcccgagcagggtgcgaaggacagccatccttctgaagagcccgttaagtcattttccaaaacacagcgctgggcagaaccaggggaacccatctgtgttgtctgtggtcgttatggagagtatatctgtgataagacagatgaagatgtgtgtagtttggagtgtaaagcgaaacatcttctacaagttaaggaaaaggaagagaaatcaaaactcagcaatccacagaaggctgattctgagccagagtctccactgaatgcttcctatgtctacaaagagcacccctttattttgaaccttcaggaagaccagattgaaaatcttaaacagcagctgggaattttagttcaagggcaagaagtcaccaggcccattattgactttgaacattgtagtctccctgaggtcttaaatcacaacttgaagaaatcaggctatgaggtgccaactcccattcaaatgcagatgattcctgtgggacttctgggaagagacattctggccagtgcagatactggctcaggaaaaacagctgcttttcttcttcctgttatcatgcgagctttattcgagagcaaaactccatctgcgctcattcttacaccaaccagagagttagccattcagatagagagacaagctaaagaattgatgagtggcctgccacgcatgaaaactgtgcttcttgtagggggcttacccttacccccacagctttatcgtctgcaacaacatgttaaggttatcatagcaacccctgggcgacttctggatataataaagcagagctctgtagaactctgtggtgtaaagattgtggtagtagatgaagctgataccatgttaaagatgggttttcaacaacaagtgcttgacattttggaaaacattcctaatgattgtcagaccattttggtttcagccacaattccaactagcatagaacagctagcaagccagcttctgcataatcctgtgagaattatcactggagaaaagaacctaccttgtgccaatgtacgtcagattattttgtgggtagaagacccagccaaaaagaaaaaattatttgaaattttaaatgataagaaactctttaagcctccagtgttagtatttgtggactgcaaactaggagcagatcttttgagtgaagccgttcagaaaatcacagggctgaaaagcatatctatacattcggagaagtcgcaaatagaaaggaaaaacatattgaagggattacttgaaggagactatgaagttgtagtgagcacaggagtcttgggacgaggcctagacttgatcagtgtcaggctggttgtcaattttgatatgccttcaagtatggatgagtatgtccatcaggaaaatacctacaagtctacttggaggaatccccagcattttcaacaggatgtcagaatgaccttgggctatgttggcaaagcacaatgggaagaagacaaccaattgaaggtcaaactaggccttaaaaaaaattgttcttcctaaatgaaactttatgtaagacccaagcttcctttatgtaaaaataggatactcactaggctttggggctgacaatggtttttaaatcttgctaatcttccctggaatgaaaccagcatgactcaaagagaaaaagagagtctataatattttctaatccctgagttcttttctttatatattaaaaaggattattaggctgggtgtggtggctcacgcctgtaatcccagcactttgggaggccgaggggagtggatcacctgagttcgagaccagcctaaccaacatggagaaaccctgtctctactaaaaatacaaaattagccaggcgtggtggcgcatgcctgtaatcccagctactcaggaggctacagcaggagaattgcttgaactcgggaggcagagccaagatcgcaccactgcactccagcctgggcaacaagagtgaaactctgtctcaaaataatattaatgataataataataataataatagggattacttgcataattgttcttttaaaattattggcagtattgctgaatgtatttagattttttcaccaagtgacaacaactgaattcataaagattcatcaacaagacctgataaaaaaaaatgtaagcatattatagtggatacttccaagactcttggtctaacatgtattagaaagcagaaggagcccaggcacaggggctcccgccggtaatcccaaagctttgggaagccaaggcaggtggatcgcttgagctcaggagttagagaccagcctgggcaacatggtgaaatcccgtcaccacaaaaaaatgcaaaaattaactgggcgtggtggcatgcacctgtagtcccagctactctggaggctgaggtgaggggaatcacctgagccgggggaatcacctgagcccagggaagttgaggctgctgtgagccatggtcatgacactgccctccagcctggacaacagattgagaccctgtctcaaaaaaaaaaaaaaaaaaaa

SEQ ID NO: 1218 - DNA, 172 bp, Artificial Sequence
  Description of Artificial sequences:primer
  misc_feature (1)..(172): 3' terminal sequence from clone image:51064. protein phosphatase, ef hand calcium-binding domain 1(PPEF1) gene.
  misc_feature (148)..(148): n is a, c, g, or t
  misc_feature (160)..(160): n is a, c, g, or t
ttttttttttttttttttttaaagatggaaagactttattccatgaataacctggtattcctcctgtctccctcagtcactcacagatgtcaagcttagtagttttctcttgtgctgtatgagttcctttcaggatgttttcaaaccnctctggcctccngggtagggggca

SEQ ID NO: 1219 - DNA, 453 bp, Artificial Sequence
  Description of Artificial sequences:primer
  misc_feature (1)..(453): 5' terminal sequence from clone image:51064. protein phosphatase, ef hand calcium-binding domain 1(PPEF1) gene.
  misc_feature (11)..(11): n is a, c, g, or t
attatgaaganggcagcaatcgaggagcttacatcaaactatgttctggtacaactcctcgatttttccagtaccaagtaactaaagcaacgtgctttcagcctcttcgccaaagagtggatactatggaaaacagcgccatcaagatattaagagagagagtgatttcacgaaaaagtgaccttactcgtgctttccaacttcaagaccacagaaaatcaggaaaactttctgtgagccagtgggctttttgcatggagaacattttggggctgaacttaccatggagatccctcagttcgaatctggtaaacatagaccaaaatggaaacgttgaatacatgtccagcttccagaattatccgcattggaaaaacctgttacaaggagggttcattctacttctagttggaaactctgttacaggttacagatctggaccggggaaatcct

SEQ ID NO: 1220 - DNA, 2873 bp, Artificial Sequence
  Description of Artificial sequences:primer
  misc_feature (1)..(2873): protein phosphatase, ef hand calcium-binding domain 1(PPEF1) gene.
tgaagattacaaatgagactgggaaaccctcttcaataagacctgtgtgatgatagattgtgtcctgagcccgcaggtcaggctgaaagagtcaacaaccagcaaagtgaagatctaggagtctgttccccttgaacctgtgtggacctgatcaaacctcgagggaaaggctgggagaacacatccctggtcagctgtaggaaagccagagagcatttgagaagaggctgaagcttgaattttgcaaacacacaagccctctgcatttccccagagagaaggtttttttctcgtcttcatttcctttgaaacacctggggtgaggaaaaacctctacattggccaagcagaagaaacagaatctatgactgaagaggatcggctaagagtggttcctcgcagcttaaagggaggcacttttcacactctgtcttaaaatcagaagttgaattcatgaacacatatgatttagatagaagtcatgggatgcagcagttcttcaacgaaaaccaggagatctgacacatcactgagagctgcgttgatcatccagaactggtaccgaggttacaaagctcgactgaaggccagacaacactatgccctcaccatcttccagtccatcgaatatgctgatgaacaaggccaaatgcagttatccaccttcttttccttcatgttggaaaactacacacatatacataaggaagagctagaattaagaaatcagtctcttgaaagcgaacaggacatgagggatagatgggattatgtggactcgatagatgtcccagactcctataatggtcctcggctacaatttcctctcacttgtacggatattgatttacttcttgaggccttcaaggaacaacagatacttcatgcccattatgtcttagaggtgctatttgaaaccaagaaagtcctgaagcaaatgccgaatttcactcacatacaaacttctccctccaaagaggtaacaatctgtggtgatttgcatgggaaactggatgatctttttttgatcttctacaagaatggtctcccctcagagaggaacccgtatgtttttaatggtgactttgtagatcgaggaaagaattccatagagatcctaatgatcctgtgtgtgagttttcttgtctaccccaatgacctgcacttgaacagagggaaccacgaagattttatgatgaatctgaggtatggcttcacgaaagaaattttgcataaatataagctacatggaaaaagaatcttacaaatcttggaagaattctatgcctggctcccaatcggtacaatcgttgacaatgaaatcctggtcatccatggtgggatatcagagaccacagacttgaatttactccaccgtgtagagaggaacaagatgaaatctgtgctgataccaccaacggaaacaaacagagaccatgacactgactcgaagcacaataaagtaggtgtgacttttaatgcacatggaagaatcaaaacaaatggatctcctactgaacacttaacagagcatgaatgggaacagattattgatattctgtggagtgatcccagaggcaaaaatggctgttttccaaatacgtgccgaggagggggctgctattttggaccagatgttacttccaagattcttaataaataccagttgaagatgctcatcaggtctcatgaatgtaagcccgaagggtatgaaatctgtcatgatgggaaggtggtgactatattttctgcttctaattattatgaagaaggcagcaatcgaggagcttacatcaaactatgttctggtacaactcctcgatttttccagtaccaagtaactaaagcaacgtgctttcagcctcttcgccaaagagtggatactatggaaaacagcgccatcaagatattaagagagagagtgatttcacgaaaaagtgaccttactcgtgctttccaacttcaagaccacagaaaatcaggaaaactttctgtgagccagtgggctttttgcatggagaacattttggggctgaacttaccatggagatccctcagttcgaatctggtaaacatagaccaaaatggaaacgttgaatacatgtccagcttccagaatatccgcattgaaaaacctgtacaagaggctcattctactctagttgaaactctgtacagatacagatctgacctggaaatcatatttaatgccattgacactgatcactcaggcctgatctccgtggaagaatttcgtgccatgtggaaactttttagttctcactacaatgttcacattgatgattcccaagtcaataagcttgccaacataatggacttgaacaaagatggaagcattgactttaatgagtttttaaaggctttctatgtagtgcatagatatgaagacttgatgaaacctgatgtcaccaaccttggctaaacacaaatgagagcttccctcaggctccctgaaacagctaggcccaaatcacaagtacagtcctttccaacacccctgaaattcatagtcagtagcagagaaaagcagatcccaattcatcccacaaacagatgcatagtatgggttttggaagtccctagcaagctgttattggtaagattaggttaaatgtcagtaataggatttggtttcagcattagtacctacatattgccagtgagaaactgggttggacctagtggtgttgtcgtgagtgccacctaaccaggaggccagagcggtttgaaaacatcctgaaaggaactcatacagcacaagagaaaactactaagcttgacatctgtgagtgactgagggagacaggaggaataccaggttattcatggaataaagtctttccatctttaaa

SEQ ID NO: 1221 - DNA, 453 bp, Artificial Sequence
  Description of Artificial sequences:primer
  misc_feature (1)..(453): 3' terminal sequence from clone image:510977. creatine kinase, brain(CKB) gene.
  misc_feature (448)..(448): n is a, c, g, or t
ttggcaggccaaaaccctagtttatttcagcatcagcagtatcttagccatcaaaaaaataaactctaccaagggtgacggaagtctctacagcaaggctaagggctcgccagacgggaaccatcaggggtgcatggtgggcactgccaggcaataagttaggaagcagcagggctggtgtcgggtgtgggccgggcttcatttctgggcaggcatgaggtcgtcgatggcctggccctgctccagccgctgctccatctcgatgagcagcttcactccgtccaccaccatctgcaccagctccacctctgagaagcccaggcggtcagcgttggagacgtcgaagaccccgcccaccgcagccgtgtccacaccgcctgtgcctcgcttctgaagtcgcagccgcttaagcacctccgagaacttctcatgcttgcccaggttgggnagctt

SEQ ID NO: 1222 - DNA, 433 bp, Artificial Sequence
  Description of Artificial sequences:primer
  misc_feature (1)..(433): 5' terminal sequence from clone image:510977. creatine kinase, brain(CKB) gene.
  misc_feature (25)..(25): n is a, c, g, or t
  misc_feature (55)..(55): n is a, c, g, or t
  misc_feature (116)..(116): n is a, c, g, or t
  misc_feature (120)..(120): n is a, c, g, or t
  misc_feature (213)..(213): n is a, c, g, or t
  misc_feature (281)..(281): n is a, c, g, or t
gacaacctgcagggcggcgacgacntggaccccaactacgtgctgagctcgcggngtgcgcacgggccgcagcatccgtggcttctgcctccccccgcactgcagccgcggggagnccgnccaatcgagaagctcgcggtggaagccctgtccagcctggacggcgacctggcgggccgatactacgcgctcaagagcatgacggaggcgganagcaagcagctcatcgacgaccacttcctcttcgacaagcccgtgtcgcccctgctgctggcctcggnattggcgccgaactggcccgacgcccgcggtatctggcacaatgacaataagaccttcctggtgtgggtcaacgaaggaggaccacctgcgggtcatctccatgcagaaggggggcaacatgaaggaggtgtttcacccgctttttgcaacc

SEQ ID NO: 1223 - DNA, 1432 bp, Artificial Sequence
  Description of Artificial sequences:primer
  misc_feature (1)..(1432): creatine kinase, brain(CKB) gene.
gctgttcggcctgcgtcgctccgggagctgccgacggacggagcgcccccgcccccgcccggccgcccgcccgccgccgccatgcccttctccaacagccacaacgcactgaagctgcgcttcccggccgaggacgagttccccgacctgagcgcccacaacaaccacatggccaaggtgctgacccccgagctgtacgcggagctgcgcgccaagagcacgccgagcggcttcacgctggacgacgtcatccagacaggcgtggacaacccgggccacccgtacatcatgaccgtgggctgcgtggcgggcgacgaggagtcctacgaagtgttcaaggatctcttcgaccccatcatcgaggaccggcacggcggctacaagcccagcgatgagcacaagaccgacctcaaccccgacaacctgcagggcggcgacgacctggaccccaactacgtgctgagctcgcgggtgcgcacgggccgcagcatccgtggcttctgcctccccccgcactgcagccgcggggagcgccgcgccatcgagaagctcgcggtggaagccctgtccagcctggacggcgacctggcgggccgatactacgcgctcaagagcatgacggaggcggagcagcagcagctcatcgacgaccacttcctcttcgacaagcccgtgtcgcccctgctgctggcctcgggcatggcccgcgactggcccgacgcccgcggtatctggcacaatgacaataagaccttcctggtgtgggtcaacgaggaggaccacctgcgggtcatctccatgcagaaggggggcaacatgaaggaggtgttcacccgcttctgcaccggcctcacccagattgaaactctcttcaagtctaaggactatgagttcatgtggaaccctcacctgggctacatcctcacctgcccatccaacctgggcaccgggctgcgggcaggtgtgcatatcaagctgcccaacctgggcaagcatgagaagttctcggaggtgcttaagcggctgcgacttcagaagcgaggcacaggcggtgtggacacggctgcggtgggcggggtcttcgacgtctccaacgctgaccgcctgggcttctcagaggtggagctggtgcagatggtggtggacggagtgaagctgctcatcgagatggagcagcggctggagcagggccaggccatcgacgacctcatgcctgcccagaaatgaagcccggcccacacccgacaccagccctgctgcttcctaacttattgcctgggcagtgcccaccatgcacccctgatgttcgccgtctggcgagcccttagccttgctgtagagacttccgtcacccttggtagagtttatttttttgatggctaagatactgctgatgctgaaataaactagggttttggcctgcctgcgtctg

SEQ ID NO: 1224 - DNA, 565 bp, Artificial Sequence
  Description of Artificial sequences:primer
  misc_feature (1)..(565): 3' terminal sequence from clone image:511778. transmembrane 4 superfamily member 1(TM4SF1) gene.
  misc_feature (342)..(342): n is a, c, g, or t
  misc_feature (451)..(451): n is a, c, g, or t
  misc_feature (459)..(459): n is a, c, g, or t
  misc_feature (497)..(497): n is a, c, g, or t
  misc_feature (512)..(512): n is a, c, g, or t
  misc_feature (550)..(550): n is a, c, g, or t
ttttttttttttggtagtgaatactttattttgttgtaaacaagttagttttgagggtatttcctcgtggtcctcctgccgtcactcgtccccatgttccaatgatgctgatcaactgctttattcagtttcccatctttcttcttgcccagtcatcgtagcctttctttttttaaacacatgatccctagtactcatctttggaggacaaaaggctttccatatgttagaaaaatttgaatctcatagtactcacaacaatgagcagcattgtaagttgtgatgcattcatttggattggaacattctcaatcagtccttccactctaagtaaatatttgnttctcacagaacacaaggcagttcaaagggcctcttgttagagatttataggtgtatgaatgggaaacatcatacaagcagtgaaaacaaaaatctttccaggttgtcngattttcnccctcctgggcctataaaagccactagacatccttaanttaaaaatacatgcncatatataccatagtgatgggatgttaattttatcccnacattatagaggtta

SEQ ID NO: 1225 - DNA, 488 bp, Artificial Sequence
  Description of Artificial sequences:primer
  misc_feature (1)..(488): 5' terminal sequence from clone image:511778. transmembrane 4 superfamily member 1(TM4SF1) gene.
  misc_feature (433)..(433): n is a, c, g, or t
  misc_feature (472)..(472): n is a, c, g, or t
  misc_feature (475)..(476): n is a, c, g, or t
catctaatttggggtatcactgagctgaagacaaagagaagggggagaaaacctagcagaccaccatgtgctatgggaagtgtgcacgatgcatcggacattctctggtggggctcgccgtcctgtgcatcgcggctaatattttgctttactttcccaatggggaaacaaagtatgcctccgaaaaccacctcagccgcttcgtgtggttcttttctggcatcgtaggaggtggcctgctgatgctcctgccagcatttgtcttcattgggctggaacaggatgactgctgtggctgctgtggccatgaaaactgtggcaaacgatgtgcgatgctttcttctgtattggctgctctcattggaattgcaggatctggctactgtgtcattgtggcagcccttgcttagcagaaggaccactatgtcctgantccctcggccagtggactacacctttgccagcaccgagnccnntaccttctggat

SEQ ID NO: 1226 - DNA, 1583 bp, Artificial Sequence
  Description of Artificial sequences:primer
  misc_feature (1)..(1583): transmembrane 4 superfamily member 1(TM4SF1) gene.
gtggtgtttgctttctccaccagaagggcacactttcatctaatttggggtatcactgagctgaagacaaagagaagggggagaaaacctagcagaccaccatgtgctatgggaagtgtgcacgatgcatcggacattctctggtggggctcgccctcctgtgcatcgcggctaatattttgctttactttcccaatggggaaacaaagtatgcctccgaaaaccacctcagccgcttcgtgtggttcttttctggcatcgtaggaggtggcctgctgatgctcctgccagcatttgtcttcattgggctggaacaggatgactgctgtggctgctgtggccatgaaaactgtggcaaacgatgtgcgatgctttcttctgtattggctgctctcattggaattgcaggatctggctactgtgtcattgtggcagcccttggcttagcagaaggaccactatgtcttgattccctcggccagtggaactacacctttgccagcaccgagggccagtaccttctggatacctccacatggtccgagtgcactgaacccaagcacattgtggaatggaatgtatctctgttttctatcctcttggctcttggtggaattgaattcatcttgtgtcttattcaagtaataaatggagtgcttggaggcatatgtggcttttgctgctctcaccaacagcaatatgactgctaaaagaaccaacccaggacagagccacaatcttcctctatttcattgtaatttatatatttcacttgtattcatttgtaaaactttgtattagtgtaacatactccccacagtctacttttacaaacgcctgtaaagactggcatcttcacaggatgtcagtgtttaaatttagtaaacttcttttttgtttgtttatttgtttttgtttttttttaaggaatgaggaaacaaaccaccctctgggggtagtttacagactgagtgacagtactcagtatatctgagataaactctataatgttttggataaaaataacattccaatcactattgtatatatgtgcatgtattttttaaattaaagatgtctagttgctttttataagaccaagaaggagaaaatccgacaacctggaaagatttttgttttcactgcttgtatgatgtttcccattcatacacctataaatctctaacaagaggccctttgaactgccttgtgttctgtgagaaacaaatatttacttagagtggaaggactgattgagaatgttccaatccaaatgaatgcatcacaacttacaatgctgctcattgttgtgagtactatgagattcaaatttttctaacatatggaaagccttttgtcctccaaagatgagtactagggatcatgtgtttaaaaaaagaaaggctacgatgactgggcaagaagaaagatgggaaactgaataaagcagttgatcagcatcattggaacatggggacgagtgacggcaggaggaccacgaggaaataccctcaaaactaacttgtttacaacaaaataaagtattcactacgaaaaaaaaaaaaaaaaaaaaaaaaaaaaaa

SEQ ID NO: 1227 - DNA, 533 bp, Artificial Sequence
  Description of Artificial sequences:primer
  misc_feature (1)..(533): 3' terminal sequence from clone image:512000. ubiquitin-conjugating enzyme e2d 3 (ubc4/5 homolog, yeast)(UBE2D3) gene.
  misc_feature (460)..(460): n is a, c, g, or t
  misc_feature (516)..(516): n is a, c, g, or t
ggtttatgcaactttattgaagaaaaataaatcaattactagcagagtaattagttgatcactcatccattgacaacttgcatcatttattcagtgctatattaaacagtgtattggaagatagattaactaatagctccaagcctcctaacaatttaaatgaaaattacaaaatgtttgagaccctattttggaatacaaagggtgtttgacttccaatttccattctctgtagaacaagaacaggtcattcctttattgacatgcataaaatacatcacattttctgttctgctgatgctataaatttcaataccaattctccagccacatccagttatgagcataaagcatatccatgtaacctcaaatctctaacagtggaaggcttaaacaagaatggatgctgctagaataatgctgtatcctttggatgtgacaactggagcatccatctccntccccctcagatggatttcttcagcatggttagaggcgtgagggatggtttagtcncataccagttagagtga

SEQ ID NO: 1228 - DNA, 505 bp, Artificial Sequence
  Description of Artificial sequences:primer
  misc_feature (1)..(505): 5' terminal sequence from clone image:512000. ubiquitin-conjugating enzyme e2d 3 (ubc4/5 homolog, yeast)(UBE2D3) gene.
  misc_feature (476)..(476): n is a, c, g, or t
  misc_feature (481)..(481): n is a, c, g, or t
  misc_feature (495)..(495): n is a, c, g, or t
aagagctcagaaactgaagcacagaaacgttaggtaggagtctgagaggcgtggagaattttgcttgtgcaagattatttcagagcaaggtcgtgcggtgtgtgtagaagatgaacagactagccactttgcattgactggaaacaatggcatttacagaaagagtcaacagcagtggcaacaggaacttagtgatttggcccgtgaccctccagcacaatgttctgcaggtccagttggggatgatatgtttcattggcaagccacaattatgggacctaatgacagcccatatcaaggcggtgtattctttttgacaattcattttcctacagactaccccttcaaaccacctaaggttgcattttacaacaagaatttatcatccaaatattaacagtaatgggcagcatttgtctcgatattctaagatcacagtggtcgcctgcttttaaccaatttcctaaaagttcctnttaanccatttggttcacngacttttttt

SEQ ID NO: 1229 - DNA, 2366 bp, Artificial Sequence
  Description of Artificial sequences:primer
  misc_feature (1)..(2366): ubiquitin-conjugating enzyme e2d 3 (ubc4/5 homolog, yeast)(UBE2D3) gene.
agcgggcggggaggggcgtggggctggatcgcgcagcggctgcttcctttaccttcctcccatggtctccttccggttctcgatgcttctctgagcctaagggtttccgccactcgttcaccctccccccagctcatgatcctcctccctcccccgccctcctggtccaatctccgatctgtttagtaagaaggtgctgttcagagaaggagaaggaaaagggcttgacacgtattcactcggccccggacgtgggaagcaagccgtctggcttcggcctcacatcggtcctgtgctcgggacggcggcgttggcggactgatccgcggcggtgaagaggcgcctgtgtctggcagagctggtgtgagacgagacaatcctgccccgccgccgggataatcaagagttttggccggacctttgagcatacaccgagagagtgaggagccagacgacaagcacacactatggcgctgaaacggattaataaggaacttagtgatttggcccgtgaccctccagcacaatgttctgcaggtccagttggggatgatatgtttcattggcaagccacaattatgggacctaatgacagcccatatcaaggcggtgtattctttttgacaattcattttcctacagactaccccttcaaaccacctaaggttgcatttacaacaagaatttatcatccaaatattaacagtaatggcagcatttgtctcgatattctaagatcacagtggtcgcctgctttaacaatttctaaagttcttttatccatttgttcactgctatgtgatccaaacccagatgaccccctagtgccagagattgcacggatctataaaacagacagagataagtacaacagaatatctcgggaatggactcagaagtatgccatgtgatgctaccttaaagtcagaataacctgcattatagctggaataaactttaaattactgttccttttttgattttcttatccggctgctcccctatcagacctcatcttttttaattttattttttgtttacctccctccattcattcacatgctcatctgagaagacttaagttcttccagctttggacaataactgcttttagaaactgtaaagtagttacaagagaacagttgcccaagactcagaatttttaaaaaaaaaaaatggagcatgtgtattatgtggccaatgtcttcactctaacttggttatgagactaaaaccattcctcactgctctaacatgctgaagaaatcatctgagggggagggagatggatgctcagttgtcacatcaaaggatacagcattattctagcagcatccattcttgtttaagccttccactgttagagatttgaggttacatgatatgctttatgctcataactgatgtggctggagaattggtattgaatttatagcatcagcagaacagaaaatgtgatgtattttatgcatgtcaataaaggaatgacctgttcttgttctacagagaatggaaattggaagtcaaacaccctttgtattccaaaatagggtctcaaacattttgtaattttcatttaaattgttaggaggcttggagctattagttaatctatcttccaatacactgtttaatatagcactgaataaatgatgcaagttgtcaatggatgagtgatcaactaatagctctgctagtaattgatttatttttcttcaataaagttgcataaaccaatgagttagctgcctggattaatcagtatgggaaacaatcttttgtaaatgcaaagctgttttttgtatatactgttgggatttgcttcattgtttgacatcaaatgatgatgtaaagttcgaaagagtgaatattttgccatgttcagttaaagtgcacagtctgttacaggttgacacattgcttgacctgatttatgcagaattaataagctatttggatagtgtagctttaatgtgctgcacatgatactggcagccctagagttcatagatggacttttgggacccagcagttttgaaatgtgtttatggagtttaagaaatttattttccaggtgcagcccctgtctaactgaaatttctcttcaccttgtacacttgacagctgaaaaaaaacaacatgggagtaataatgggtcaaaatttgcaaaataaagtactgttttggtgtgggagttgtcatgaggctgtgttgaagtgacttatctatgtgggatattgagtatccattgaaatggatttgttcagccatttacattaatgagcatttaaatgcaacagatatcatttcaggtgacttaacatgaatgaataaaagtcaatgctattggaaaaaaaaaaaaaaaa

SEQ ID NO: 1230 - DNA, 470 bp, Artificial Sequence
  Description of Artificial sequences:primer
  misc_feature (1)..(470): 3' terminal sequence from clone image:512333. likely ortholog of mouse myeloid ecotropic viral integration site-related gene 2(MRG2) gene.
  misc_feature (262)..(262): n is a, c, g, or t
ccgtgtttttaagactttatcattaaaaaaaagaagaaattagagaagggaggtaggggggacaggagagtgaaggaatctctccaaaatgtcggatccgggcgaccctacttccctgactgcccagccaccccgtcccttctctgtcctggcggcgaggcctagccgcatcttctggggaccaaggcccaggagcccagctcgggtcccaggcagaggtgaaggcagaagtggggctcagggcctggaggctttgccggtngtccttgagagcccttggatgggcactcaggcccccattgtcccagcagggccctagggaggtaggcattgagcagaggggcctttggaggtggggtcctgaagctggaggaccaggcgggaaccagaggcaggtgtgaggctgggggtcacagccggatggggttcctctcctgcatcagcctctatagataatgccattctccttc

SEQ ID NO: 1231 - DNA, 389 bp, Artificial Sequence
  Description of Artificial sequences:primer
  misc_feature (1)..(389): 3' terminal sequence from clone image:512824. adenylate kinase 5(AK5) gene.
  misc_feature (51)..(51): n is a, c, g, or t
  misc_feature (211)..(211): n is a, c, g, or t
  misc_feature (226)..(226): n is a, c, g, or t
  misc_feature (292)..(292): n is a, c, g, or t
  misc_feature (315)..(315): n is a, c, g, or t
aggacactatgggaggtttcatggaagatttgagaaagtgtaaaattattntcataattggtggtcctggctctggcaaaggcacacagtgtgaaaagctggtggaaaaatatggatttacacatctctcaactggcgagctcctgcgtgaggaactggcatcagaatctgaaagaagcaaattgatcagagacattatggaacgtggagncctggtgccctcagnatcgttttggagctcctgaaggaggccatggtggcatgcctcggggacaccaggggcttcctgatntgaccggctatcctcgggaggtngaagcaaggggaagagttccggacgcaggatttggagacccacagttgggtgatctgtatggactgctcggcag

SEQ ID NO: 1232 - DNA, 3962 bp, Artificial Sequence
  Description of Artificial sequences:primer
  misc_feature (1)..(3962): adenylate kinase 5(AK5) gene.
agtcttccagcagggttctgaaagcagcctgctcccatcgcgcccctcggatgtggacacccagggtgggctgcagaccgcggccgggccgcactctctgggggcgagggccaggtcaggtggctgcactgtcgcccagcagcgagtaaagactcgaaactgagggagccagagccctagtcactctgctggtcgagggtcggaaccgctgggggaaagaggaaatgtggacgaaggcagcccttcctggagacagcttggaagagagggatgaagatgcaaaaagcaaaacccaacctatcaagtgccacctccccggtgacaggcccccagccttgctctgcgctttcgctgaatgaactcctgagcacgtttttcccgttgcctaggaagggttgggccgcaggtttcgccagtgctcgacaacccacctggagatagcgggtcggggagggagctgcgaggggggcggactcctgttgctcagtcttcagaccgcagcacagcatcatctgcaccgggacccgggaatggggggacacttggagactgagagagaggaggctcgaggaatgaaccttggtctgttctaagccacaacccctgtctcaggtcgtttggcttcctttccttctctttgtatttgaatttaaaaacattcctgaatctcaagtgcttttgcttgaagtaggggggaggaggagaaaagaatagaagcaagccaggcttcctaagcgagctctgaaaggagaaatccattcactgcaaacctcgttccccatttctgaaaacggatagactgatatcgtaaactaaaggtcatgagggtttttccccccggtttgggggatttgttctgttaaaaggaattttaaagcaccacttgagaaaataattttgcctcagtttccctaaactatctttaaaatgggttgccataattacaggtcttcttttctctcacctctataagccaccgttttcaggtcatctgaagtcaagatttccagccttttgaatggactgatgtgttctaagcccgaagatccagtagaatacttggaaagttgtttacaaaaagtaaaggaactgggtggctgtgacaaggtgaaatgggatacatttgtaagccaggaaaagaagaccttacctccactaaatggaggacagtcacggagatcctttctaagaaatgtaatgcctgaaaactcaaactttccatatcggcggtatgaccggctccctccaatccatcaattctccatagaaagtgacacggatctctctgagactgcagagttgattgaggagtatgaggtttttgatcctaccagacctcgaccaaaaatcattcttgttataggtggtccaggaagtggaaagggtactcagagtttgaaaattgcagaacgatatggattccaatacatttctgtgggagaattattaagaaagaagatccacagtaccagcagcaataggaaatggagtcttattgccaagataattacaactggagaattggccccacaggaaacaacaattacagagataaaacaaaaattgatgcaaatacctgatgaagagggcattgttattgatggatttccaagagatgttgcccaggctctatcttttgaggaccaaatctgtacccccgatttggtggtattcctggcttgtgctaatcagagactcaaagaaagattactgaagcgtgcagaacagcagggccgaccagacgacaatgtaaaagctacccaaaggagactaatgaacttcaagcagaatgctgctccattggttaaatacttccaggaaaaggggctcatcatgacatttgatgccgaccgcgatgaggatgaggtgttctatgacatcagcatggcagttgacaacaagttatttccaaacaaagaggctgcagcaggttcaagtgaccttgatccttcgatgatattggacactggagagatcattgatacaggatctgattatgaagatcagggtgatgaccagttaaatgtatttggagaggacactatgggaggtttcatggaagatttgagaaagtgtaaaattattttcataattggtggtcctggctctggcaaaggcacacagtgtgaaaagctggtggaaaaatatggatttacacatctctcaactggcgagctcctgcgtgaggaactggcatcagaatctgaaagaagcaaattgatcagagacattatggaacgtggagacctggtgccctcaggcatcgttttggagctcctgaaggaggccatggtggccagcctcggggacaccaggggcttcctgattgacggctatcctcgggaggtgaagcaaggggaagagttcggacgcaggattggagacccacagttggtgatctgtatggactgctcggcagacaccatgaccaaccgccttctccaaaggagccggagcagcctgcctgtggacgacaccaccaagaccatcgccaagcgcctagaagcctactaccgagcgtccatccccgtgatcgcctactacgagacaaaaacacagctacacaagataaatgcagagggaacaccagaggacgtttttcttcaactctgcacagctattgactctattttctgaaggcaaaaatgcatgtttgttagaatggaaacagaaaaacattaaaaagttcattccttaacacaatgtttcaagttaaaccttttgtgtcaccgcccccaccaaccaccacctcctaaatcctgacagcactgtttgcttcccagctagacctgtgtgagaggtgtctggaaatcatgcatggtgtatttgggactatatcaacctattctccacacttcagacaactgtctgcactcacggcacacacactttgtatcatgcaggccacactcagagctagtcagtacatgaacagtggtgcggtgccagtctgtgtccgttgtgatcacaggccttgctagaccctgatcatctggttctcctctcattaagcatccctaacccccagtcacaccttcctcttacatactgttccccaatggaggcccctggcataggggacagccctgggcatcttcctttggtgtctggctgttttgtcaactctcatccactggtggctcagagccataaggtgggttgattacacaatgccttgtacatgatatagaggcatcaagcaagtaaaatttgacagaaattttaaaatatgaagatgtatagctttcccaagatgatggtaaaacccaggttagtcatcagtaaccttctctattattattattttttagaaacttggaatactgtcgtcatggctaagagaacaaatctgataaattgtgtaacctagtctcttctctacatggtgatgcatttcagcaattataaattaatataaatgaccaaaagtaacttaaaagcatgagatatttgctatttcattcattgggcacatatcaaattataattttgattttaaatggtcacccatgtatttatttgttgccaagcaagtaaaaaaataccctaacaaacctgatgtgggtgggaggggcatgtcagtaagtggtgtgttcaatgtgtttgtttcatatgggccctttccaggagtttgcaaaccttgtcatacccatatgcaaaactgtgtttccttgcattaaaccagtgaagtttgggttctcttttgtgctatcaatcagttgtaaaatcagagctgcttatatattctactggaataactgcatcttccactcagtcactacaaaaaagcatagtttcagtttgcatgaatttttttttttttcttcaatggctgtgcagataaggatccatttctgggatagaattgtattttttaagtcatttttttttcttgaaatggatatgtacaaataaaataaatggaagacaggataaaaaaaaaaaaaaaaaaaaaaaaaaaa

SEQ ID NO: 1233 - DNA, 481 bp, Artificial Sequence
  Description of Artificial sequences:primer
  misc_feature (1)..(481): 3' terminal sequence from clone image:512924.
gccgagtcaccgtcagatgtcgggcaaagaccggattgaaatcttcccttcgcgaatggcacagaccatcatgaaggctcgattaaaaggagcacagactggtcgaaaccttctgaagaaaaagtctgatgccttaactcttcgatttcgacagatcctgaagaagataatagagactaaaatgctgatgggtgaagtgatgagagaagctgccttctcattggctgaggcaaattcacagcaggggacttcagcaccacagttatccaaaatgtaaataaagcccaagtgaagatcagagcaaagaaagacaatgtagcaggtgttaccttgccagtgtttgaacattaccacgaaggaactgacagctatgaactgaccggtttagccagaggtgggggagcagctggctaaactaaagcggaattatgccaaagcagtggaactactggtggaactggcttccctgcagacttccttt

SEQ ID NO: 1234 - DNA, 151 bp, Artificial Sequence
  Description of Artificial sequences:primer
  misc_feature (1)..(151): 5' terminal sequence from clone image:512924.
  misc_feature (97)..(97): n is a, c, g, or t
  misc_feature (125)..(125): n is a, c, g, or t
  misc_feature (130)..(130): n is a, c, g, or t
  misc_feature (139)..(139): n is a, c, g, or t
  misc_feature (144)..(144): n is a, c, g, or t
aaaatcattttactctgttcataggtcacatttaaatgggcagaactgcttccattacaaacacatatcgtgcaaagaaaaataggtgaagaattgngccataggaacacaatggctgtacagcnccggncaacagccnggcanggtttcc

SEQ ID NO: 1235 - DNA, 501 bp, Artificial Sequence
  Description of Artificial sequences:primer
  misc_feature (1)..(501): 3' terminal sequence from clone image:513189.
tttttaaaattaagtaatttatttataaaataacaaaaatgtatgaacagatctgtttattgtgaaaatggtcttggtacatatgagaaacattatatactttgaggacagcattcagaactgttaagataaaagacagactataattttaaactcattcttgatttaggggaaaggctataaattactggctggaatgcattcagcatgaactcaaattctacataacataaagcatgaaaagagtacaaaagatgttggagtccaatcagcccacacctaaattttaagcataaactttcaaagaccttttgttcatccttatagactagtcttcttttgagacaggttgattttatctccaaggctcaaggccattccctgactttttgcacgaattcttatatggccagtaacggcagcatctggtccctggtgaactgggcttctcaatgctgacatttgcaagtgcatcctctccaaatatagaacgtgcataaa

SEQ ID NO: 1236 - DNA, 469 bp, Artificial Sequence
  Description of Artificial sequences:primer
  misc_feature (1)..(469): 3' terminal sequence from clone image:52065. growth arrest and dna-damage-inducible, alpha(GADD45A) gene.
  misc_feature (184)..(184): n is a, c, g, or t
  misc_feature (333)..(333): n is a, c, g, or t
  misc_feature (391)..(391): n is a, c, g, or t
  misc_feature (414)..(414): n is a, c, g, or t
  misc_feature (436)..(436): n is a, c, g, or t
  misc_feature (448)..(448): n is a, c, g, or t
ttttttttttttgatgcaattattcataccagtttattgtaggtattgtgtttcaaaaaatttatagcataaataacttttcatgtcataaaataacttagtagaatttataataaaactttgagaatttaatatctcatcaaaatacaataaaatatggttttcaaatatgattaaccctttnggcttttcttttacttgagggcatataaaccaaaaatacccaaactatggctgcacacttaaactttaacatatttggtttattttaatgtaactcaaccattctaaattaatacatagttttccttcctgcatggttctttgtaattntggttcctttgggacttattttcctgtttcaacacagcttccttcttcattttcaccncttgccatctggcaaagtcatcnatctccggggcccccagaacangtagttggaacncactcagcccctgggatcagt

SEQ ID NO: 1237 - DNA, 1355 bp, Artificial Sequence
  Description of Artificial sequences:primer
  misc_feature (1)..(1355): growth arrest and dna-damage-inducible, alpha(GADD45A) gene.
cagtggctggtaggcagtggctgggaggcagcggcccaattagtgtcgtgcggcccgtggcgaggcgaggtccggggagcgagcgagcaagcaaggcgggaggggtggccggagctgcggcggctggcacaggaggaggagcccgggcgggcgaggggcggccggagagcgccagggcctgagctgccggagcggcgcctgtgagtgagtgcagaaagcaggcgcccgcgcgctagccgtggcaggagcagcccgcacgccgcgctctctccctgggcgacctgcagtttgcaatatgactttggaggaattctcggctggagagcagaagaccgaaaggatggataaggtgggggatgccctggaggaagtgctcagcaaagccctgagtcagcgcacgatcactgtcggggtgtacgaagcggccaagctgctcaacgtcgaccccgataacgtggtgttgtgcctgctggcggcggacgaggacgacgacagagatgtggctctgcagatccacttcaccctgatccaggcgttttgctgcgagaacgacatcaacatcctgcgcgtcagcaacccgggccggctggcggagctcctgctcttggagaccgacgctggccccgcggcgagcgagggcgccgagcagcccccggacctgcactgcgtgctggtgacgaatccacattcatctcaatggaaggatcctgccttaagtcaacttatttgtttttgccgggaaagtcgctacatggatcaatgggttccagtgattaatctccctgaacggtgatggcatctgaatgaaaataactgaaccaaattgcactgaagtttttgaaatacctttgtagttactcaagcagttactccctacactgatgcaaggattacagaaactgatgccaaggggctgagtgagttcaactacatgttctgggggcccggagatagatgactttgcagatggaaagaggtgaaaatgaagaaggaagctgtgttgaaacagaaaaataagtcaaaaggaacaaaaattacaaagaaccatgcaggaaggaaaactatgtattaatttagaatggttgagttacattaaaataaaccaaatatgttaaagtttaagtgtgcagccatagtttgggtatttttggtttatatgccctcaagtaaaagaaaagccgaaagggttaatcatatttgaaaaccatattttattgtattttgatgagatattaaattctcaaagttttattataaattctactaagttattttatgacatgaaaagttatttatgctataaattttttgaaacacaatacctacaataaactggtatgaataattgcatcatt

SEQ ID NO: 1238 - DNA, 412 bp, Artificial Sequence
  Description of Artificial sequences:primer
  misc_feature (1)..(412): 3' terminal sequence from clone image:52228. glutamate receptor, ionotropic, ampa 1(GRIA1) gene.
  misc_feature (329)..(329): n is a, c, g, or t
  misc_feature (337)..(337): n is a, c, g, or t
  misc_feature (377)..(377): n is a, c, g, or t
  misc_feature (396)..(396): n is a, c, g, or t
tttttttttttttaccaaagagcaaaatttaatgaaagccagaactgttaagtatggattcctgttgagaaaaatgtcagtctctttcagagttttcccaatgctctatttttaagaaaagtgtagtaaaaatacataatacaagttaacttttttcttgcttgtgttttcctttcatttctccattgatgaaaaagcacatttcgccagagtcttgggaccccctcataggcataggaccctcatttctaggcacaaacaagtctctttttatccgctcatgttacttgtgggggctcagtagctgggagagggcatcttactagggnccaaaggnaaaaaaggtctttgaaggcatgttggatggttaaaggggntattttccaactttttccnagggtggcaggcttcc

SEQ ID NO: 1239 - DNA, 342 bp, Artificial Sequence
  Description of Artificial sequences:primer
  misc_feature (1)..(342): 5' terminal sequence from clone image:52228. glutamate receptor, ionotropic, ampa 1(GRIA1) gene.
  misc_feature (107)..(107): n is a, c, g, or t
  misc_feature (209)..(209): n is a, c, g, or t
  misc_feature (232)..(232): n is a, c, g, or t
  misc_feature (253)..(253): n is a, c, g, or t
  misc_feature (282)..(282): n is a, c, g, or t
  misc_feature (339)..(339): n is a, c, g, or t
tcagattggagattcaagatttgttccactttacaagcaagaggaaaaaaaagcaaccttcaaactaattctccatgggggctctccatgttaccctccactccttngcccaaacctctgatggagatagacattgttggagaagtggggctgccttccccaagtggggcactgcttaagcacttattcagtggagaacacaggtgaanagcaactcaggatgagggtggtngagagggcaggggcagatgtncagtcagagaaggactcctgaagttactnctgctcagaaaaacagttcctttaatgtgggaggagccatttcataggtcataggtngta

SEQ ID NO: 1240 - DNA, 3242 bp, Artificial Sequence
  Description of Artificial sequences:primer
  misc_feature (1)..(3242): glutamate receptor, ionotropic, ampa 1(GRIA1) gene.
gaaaggaaggaagcaagcaagcaaggaaggaactgcaggaggaaaagaacaggcagaacagcgaaaagaataaagggaaagggggggaaacaccaaatctatgattggacctgggcttctttttcgccaatgcaaaaaggaatatgcagcacatttttgccttcttctgcaccggtttcctaggcgcggtagtaggtgccaatttccccaacaatatccagatcgggggattatttccaaaccagcagtcacaggaacatgctgcttttagatttgctttgtcgcaactcacagagcccccgaagctgctcccccagattgatattgtgaacatcagcgacagctttgagatgacctatagattctgttcccagttctccaaaggagtctatgccatctttgggttttatgaacgtaggactgtcaacatgctgacctccttttgtggggccctccacgtctgcttcattacgccgagctttcccgttgatacatccaatcagtttgtccttcagctgcgccctgaactgcaggatgccctcatcagcatcattgaccattacaagtggcagaaatttgtctacatttatgatgccgaccggggcttatccgtcctgcagaaagtcctggatacagctgctgagaagaactggcaggtgacagcagtcaacatcttgacaaccacagaggagggataccggatgctctttcaggacctggagaagaaaaaggagcggctggtggtggtggactgtgaatcagaacgcctcaatgctatcttgggccagattataaagctagagaagaatggcatcggctaccactacattcttgcaaatctgggcttcatggacattgacttaaacaaattcaaggagagtggcgccaatgtgacaggtttccagctggtgaactacacagacactattccggccaagatcatgcagcagtggaagaatagtgatgctcgagaccacacacgggtggactggaagagacccaagtacacctctgcgctcacctacgatggggtgaaggtgatggctgaggctttccagagcctgcggaggcagagaattgatatatctcgccgggggaatgctggggattgtctggctaacccagctgttccctggggccaagggatcgacatccagagagctctgcagcaggtgcgatttgaaggtttaacaggaaacgtgcagtttaatgagaaaggacgccggaccaactacacgctccacgtgattgaaatgaaacatgacagcatccgaaagattggttactggaatgaagatgataagtttgtccctgcagccaccgatgcccaagctgggggcgataattcaagtgttcagaacagaacatacatcgtcacaacaatcctagaagatccttatgtgatgctcaagaagaacgccaatcagtttgagggcaatgaccgttacgagggctactgtgtagagctggcggcagagattgccaagcacgtgggctactcctaccgtctggagattgtcagtgatggaaaatacggagcccgagaccctgacacgaaggcctggaatggcatggtgggagagctggtctatggaagagcagatgtggctgtggctcccttaactatcactttggtccgggaagaagttatagatttctccaaaccatttatgagtttggggatctccatcatgattaaaaaaccacagaaatccaagccgggtgtcttctccttccttgatcctttggcttatgagatttggatgtgcattgtttttgcctacattggagtgagtgttgtcctcttcctggtcagccgcttcagtccctatgaatggcacagtgaagagtttgaggaaggacgggaccagacaaccagtgaccagtccaatgagtttgggatattcaacagtttgtggttctccctgggagccttcatgcagcaaggatgtgacatttctcccaggtccctgtctggtcgcatcgttggtggcgtctggtggttcttcaccttaatcatcatctcctcatatacagccaatctggccgccttcctgaccgtggagaggatggtgtctcccattgagagtgcagaggacctagcgaagcagacagaaattgcctacgggacgctggaagcaggatctactaaggagttcttcaggaggtctaaaattgctgtgtttgagaagatgtggacatacatgaagtcagcagagccatcagtttttgtgcggaccacagaggaggggatgattcgagtgaggaaatccaaaggcaaatatgcctacctcctggagtccaccatgaatgagtacattgagcagcggaaaccctgtgacaccatgaaggtgggaggtaacttggattccaaaggctatggcattgcaacacccaaggggtctgccctgagaaatccagtaaacctggcagtgttaaaactaaacgagcaggggcttttggacaaattgaaaaacaaatggtggtacgacaagggcgagtgcggcagcgggggaggtgattccaaggacaagacaagcgctctgagcctcagcaatgtggcaggcgtgttctacatcctgatcggaggacttggactagccatgctggttgccttaatcgagttctgctacaaatcccgtagtgaatccaagcggatgaagggtttttgtttgatcccacagcaatccatcaacgaagccatacggacatcgaccctcccccgcaacagcggggcaggagccagcagcggcggcagtggagagaatggtcgggtggtcagccatgacttccccaagtccatgcaatcgattccttgcatgagccacagttcagggatgcccttgggagccacgggattgtaactggagcagatggagaccccttggggagcaggctcggctccccagccccatcccaaacccttcagtgccaaaaacaacaacaaaatgaaacgcaaccaccaccaaccactgcgaccacaagaaggatgattcaacaggttttcctgaagaattgaaaaaccattttgctgtcccttttccttttttgatgttctttcacccttttctgtttgctaagtgaggatgaaaaaataacactgtactgcaataaggggagagtaaccctgtctaatgaaacctgtgtctctgagagtagagtcactggaacactaatgaggaaactgcactgttttattttaattcagttgttagtgtgtcttagtgtgtgcaatttttccc

SEQ ID NO: 1241 - DNA, 398 bp, Artificial Sequence
  Description of Artificial sequences:primer
  misc_feature (1)..(398): 3' terminal sequence from clone image:525983. isocitrate dehydrogenase 1 (nadp+), soluble(IDH1) gene.
  misc_feature (303)..(303): n is a, c, g, or t
gcttgtgagcggctgtggcgccccaactcttcgccagcatatcatcccggcagcgataaactacattcagttgagtctgcaagactgggaggaactggggtgataagaaatctattcactgtcaaggtttattgaagtcaaaatgtccaaaaaaatcagtggcggttctgtggtagagatgcaaggagatgaaatgacaccgaatcatttgggaattgattaaagagaaactcatttttccctacgtggaattggatctacatagctatgatttaggcatagagaatcgtgatgccaccaacngaccaagtcaccaaggattgctgcagaagctataaagaagcataatgttggcgtcaaatgtgccactatcactcctgatgagaagagggttgaga

SEQ ID NO: 1242 - DNA, 344 bp, Artificial Sequence
  Description of Artificial sequences:primer
  misc_feature (1)..(344): 5' terminal sequence from clone image:525983. isocitrate dehydrogenase 1 (nadp+), soluble(IDH1) gene.
  misc_feature (2)..(2): n is a, c, g, or t
  misc_feature (67)..(67): n is a, c, g, or t
tntttgtaattagcacttaattttaattaaaatcaacagttcaggagaagataagatagtgtttaanatcaatttctgagaaatcacatttatataaaagaaataaaacaggccagcagaagtccaaaaaagattcagcttacattattgcacttggatgaaatatgctatttagagtagtataatattcaagccaaggccaggaggagaaagagaaaaatggagaggacaaacctccaggtagtatttattccggattccaaactctcctgccggcctaaacagtatttagtctattggaaacattcagcaaggtctttacaaaaatgactgcagtatcttca

SEQ ID NO: 1243 - DNA, 2339 bp, Artificial Sequence
  Description of Artificial sequences:primer
  misc_feature (1)..(2339): isocitrate dehydrogenase 1 (nadp+), soluble(IDH1) gene.
cctgtggtcccgggtttctgcagagtctacttcagaagcggaggcactgggagtccggtttgggattgccaggctgtggttgtgagtctgagcttgtgagcggctgtggcgccccaactcttcgccagcatatcatcccggcaggcgataaactacattcagttgagtctgcaagactgggaggaactggggtgataagaaatctattcactgtcaaggtttattgaagtcaaaatgtccaaaaaaatcagtggcggttctgtggtagagatgcaaggagatgaaatgacacgaatcatttgggaattgattaaagagaaactcatttttccctacgtggaattggatctacatagctatgatttaggcatagagaatcgtgatgccaccaacgaccaagtcaccaaggatgctgcagaagctataaagaagcataatgttggcgtcaaatgtgccactatcactcctgatgagaagagggttgaggagttcaagttgaaacaaatgtggaaatcaccaaatggcaccatacgaaatattctgggtggcacggtcttcagagaagccattatctgcaaaaatatcccccggcttgtgagtggatgggtaaaacctatcatcataggtcgtcatgcttatggggatcaatacagagcaactgattttgttgttcctgggcctggaaaagtagagataacctacacaccaagtgacggaacccaaaaggtgacatacctggtacataactttgaagaaggtggtggtgttgccatggggatgtataatcaagataagtcaattgaagattttgcacacagttccttccaaatggctctgtctaagggttggcctttgtatctgagcaccaaaaacactattctgaagaaatatgatgggcgttttaaagacatctttcaggagatatatgacaagcagtacaagtcccagtttgaagctcaaaagatctggtatgagcataggctcatcgacgacatggtggcccaagctatgaaatcagagggaggcttcatctgggcctgtaaaaactatgatggtgacgtgcagtcggactctgtggcccaagggtatggctctctcggcatgatgaccagcgtgctggtttgtccagatggcaagacagtagaagcagaggctgcccacgggactgtaacccgtcactaccgcatgtaccagaaaggacaggagacgtccaccaatcccattgcttccatttttgcctggaccagagggttagcccacagagcaaagcttgataacaataaagagcttgccttctttgcaaatgctttggaagaagtctctattgagacaattgaggctggcttcatgaccaaggacttggctgcttgcattaaaggtttacccaatgtgcaacgttctgactacttgaatacatttgagttcatggataaacttggagaaaacttgaagatcaaactagctcaggccaaactttaagttcatacctgagctaagaaggataattgtcttttggtaactaggtctacaggtttacatttttctgtgttacactcaaggataaaggcaaaatcaattttgtaatttgtttagaagccagagtttatcttttctataagtttacagcctttttcttatatatacagttattgccacctttgtgaacatggcaagggacttttttacaatttttattttattttctagtaccagcctaggaattcggttagtactcatttgtattcactgtcactttttctcatgttctaattataaatgaccaaaatcaagattgctcaaaagggtaaatgatagccacagtattgctccctaaaatatgcataaagtagaaattcactgccttcccctcctgtccatgaccttgggcacagggaagttctggtgtcatagatatcccgttttgtgaggtagagctgtgcattaaacttgcacatgactggaacgaagtatgagtgcaactcaaatgtgttgaagatactgcagtcatttttgtaaagaccttgctgaatgtttccaatagactaaatactgtttaggccgcaggagagtttggaatccggaataaatactacctggaggtttgtcctctccatttttctctttctcctcctggcctggcctgaatattatactactctaaatagcatatttcatccaagtgcaataatgtaagctgaatcttttttggacttctgctggcctgttttatttcttttatataaatgtgatttctcagaaattgatattaaacactatcttatcttctcctgaactgttgattttaattaaaattaagtgctaattaccaaaaaaaaaaa

SEQ ID NO: 1244 - DNA, 397 bp, Artificial Sequence
  Description of Artificial sequences:primer
  misc_feature (1)..(397): 3' terminal sequence from clone image:526038.
  misc_feature (290)..(290): n is a, c, g, or t
aaaaaaagaatcccaggattttccctcctgtatgttttcgtcttgcctcttcatggtccataatgccagccgaggttgtcagcacaatgaagccaaactgacgtgaagggagcaggttgttctgccatttctctaggtctttgagttgaacatcaaatctagggcttataacgccacacttgttcaaccttcctgtgaggttcacaacaatcttcccagctctgtgatcatcaatgatctcaaattcaccaatgtatccgtgcttcatcatcacggttaagaaccgaacngatgactttagaacatggcctgatgaggacctggcgtttgcctctcttctcagcgttgttgatgctcttgagagatccgccagaacattcattcgcacatggtggcg

SEQ ID NO: 1245 - DNA, 434 bp, Artificial Sequence
  Description of Artificial sequences:primer
  misc_feature (1)..(434): 5' terminal sequence from clone image:526038.
  misc_feature (39)..(39): n is a, c, g, or t
tcgccgccaccatggtgcgaatgaatgttctggcggatntctcaagagcatcaacaacgctgagaagagaggcaaacgccaggtcctcatcaggccatgttctaaagtcatcgttcggttcttaaccgtgatgatgaagcacggatacattggtgaatttgagatcattgatgatcacagagctgggaagattgttgtgaacctcacaggaaggttgaacaagtgtggcgttataagccctagatttgatgttcaactcaaagacctagagaaatggcagaacaacctgctcccttcaccgtcagttttggcttcattgtgcttgacaacctccggcttggcatttattgggacccattgaagaggccaagaccgaaaacattccaggagggaaaatccctggggattctttttttttaaaacgttaaagccat

SEQ ID NO: 1246 - DNA, 365 bp, Artificial Sequence
  Description of Artificial sequences:primer
  misc_feature (1)..(365): 3' terminal sequence from clone image:52982. ptk2 protein tyrosine kinase 2(PTK2) gene.
  misc_feature (132)..(132): n is a, c, g, or t
  misc_feature (207)..(207): n is a, c, g, or t
  misc_feature (249)..(249): n is a, c, g, or t
  misc_feature (294)..(294): n is a, c, g, or t
  misc_feature (310)..(310): n is a, c, g, or t
ttttttttactggtaacacctttttaataggtcaaagtaactgtacagttcattatattcttcctgagaataatttatatcccccaacaaactaaagggagggtatattttttcaaaattaacagaatgganggtgtaactggacatcaaaagaaaaccaaattcctgttttgcttcattctctcctgggaagacagatacaaggangggttagttaactccagtgggctgtaaaatagtcaacatggnctttaatctttctttatagattatataaaaatgggaaaaaggggntggttctgggaacttntcctcaatggcagtttgggaggtgctctgggtacaaggcatttctgctttccagg

SEQ ID NO: 1247 - DNA, 394 bp, Artificial Sequence
  Description of Artificial sequences:primer
  misc_feature (1)..(394): 5' terminal sequence from clone image:52982. ptk2 protein tyrosine kinase 2(PTK2) gene.
  misc_feature (223)..(223): n is a, c, g, or t
  misc_feature (343)..(343): n is a, c, g, or t
tcgaggcagtattgacagggaggatggaagtcttcagggtccgattggaaaccaacatatatatcagcctgtgggtaaaccagatcctgcagctccaccaaagaaaccgcctcgccctggagctcccggtcatctgggaagccttgccagcctcagcagccctgctgacagctacaacgagggtgtcaagccatggaggcttcagcccaggaaatcagccccnctcctactgccaacctggaccggtcgaatgataaggtgtacgagaatgtgacgggcctgggtgaaagctgtcatcgagatgtccagtaaaatccagccagccccaccagaggagtatgtncctatgggtgaagggaagttggctttggccttgaggacattattttggcca

SEQ ID NO: 1248 - DNA, 4453 bp, Artificial Sequence
  Description of Artificial sequences:primer
  misc_feature (1)..(4453): ptk2 protein tyrosine kinase 2(PTK2) gene.
gaccactgtgagcccgcggcgtgaggcgtgggaggaagcgcggctgctgtcgcccagcgccgccccgtcgtcgtctgccttcgcttcacggcgccgagccgcggtccgagcagaactggggctcccttgcatcttccagttacaaattcagtgccttctgcagtttccccagagctcctcaagaataacggaagggagaatatgacagatacctagcatctagcaaaataatggcagctgcttaccttgaccccaacttgaatcacacaccaaattcgagtactaagactcacctgggtactggtatggaacgttctcctggtgcaatggagcgagtattaaaggtctttcattattttgaaagcaatagtgagccaaccacctgggccagtattatcaggcatggagatgctactgatgtcaggggcatcattcagaagatagtggacagtcacaaagtaaagcatgtggcctgctatggattccgcctcagtcacctgcggtcagaggaggttcactggcttcacgtggatatgggcgtctccagtgtgagggagaagtatgagcttgctcacccaccagaggagtggaaatatgaattgagaattcgttatttgccaaaaggatttctaaaccagtttactgaagataagccaactttgaatttcttctatcaacaggtgaagagcgattatatgttagagatagctgatcaagtggaccaggaaattgctttgaagttgggttgtctagaaatacggcgatcatactgggagatgcggggcaatgcactagaaaagaagtctaactatgaagtattagaaaaagatgttggtttaaagcgattttttcctaagagtttactggattctgtcaaggccaaaacactaagaaaactgatccaacaaacatttagacaatttgccaaccttaatagagaagaaagtattctgaaattctttgagatcctgtctccagtctacagatttgataaggaatgcttcaagtgtgctcttggttcaagctggattatttcagtggaactggcaatcggcccagaagaaggaatcagttacctaacggacaagggctgcaatcccacacatcttgctgacttcactcaagtgcaaaccattcagtattcaaacagtgaagacaaggacagaaaaggaatgctacaactaaaaatagcaggtgcacccgagcctctgacagtgacggcaccatccctaaccattgcggagaatatggctgacctaatagatgggtactgccggctggtgaatggaacctcgcagtcatttatcatcagacctcagaaagaaggtgaacgggctttgccatcaataccaaagttggccaacagcgaaaagcaaggcatgcggacacacgccgtctctgtgtcagaaacagatgattatgctgagattatagatgaagaagatacttacaccatgccctcaaccagggattatgagattcaaagagaaagaatagaacttggacgatgtattggagaaggccaatttggagatgtacatcaaggcatttatatgagtccagagaatccagctttggcggttgcaattaaaacatgtaaaaactgtacttcggacagcgtgagagagaaatttcttcaagaagccttaacaatgcgtcagtttgaccatcctcatattgtgaagctgattggagtcatcacagagaatcctgtctggataatcatggagctgtgcacacttggagagctgaggtcatttttgcaagtaaggaaatacagtttggatctagcatctttgatcctgtatgcctatcagcttagtacagctcttgcatatctagagagcaaaagatttgtacacagggacattgctgctcggaatgttctggtgtcctcaaatgattgtgtaaaattaggagactttggattatcccgatatatggaagatagtacttactacaaagcttccaaaggaaaattgcctattaaatggatggctccagagtcaatcaattttcgacgttttacctcagctagtgacgtatggatgtttggtgtgtgtatgtgggagatactgatgcatggtgtgaagccttttcaaggagtgaagaacaatgatgtaatcggtcgaattgaaaatggggaaagattaccaatgcctccaaattgtcctcctaccctctacagccttatgacgaaatgctgggcctatgaccccagcaggcggcccaggtttactgaacttaaagctcagctcagcacaatcctggaggaagagaaggctcagcaagaagagcgcatgaggatggagtccagaagacaggccacagtgtcctgggactccggagggtctgatgaagcaccgcccaagcccagcagaccgggttatcccagtccgaggtccagcgaaggattttatcccagcccacagcacatggtacaaaccaatcattaccaggtttctggctaccctggttcacatggaatcacagccatggctggcagcatctatccaggtcaggcatctcttttggaccaaacagattcatggaatcatagacctcaggagatagcaatgtggcagcccaatgtggaggactctacagtattggacctgcgagggattgggcaagtgttgccaacccatctgatggaagagcgtctaatccgacagcaacaggaaatggaagaagatcagcgctggctggaaaaagaggaaagatttctgaaacctgatgtgagactctctcgaggcagtattgacagggaggatggaagtcttcagggtccgattggaaaccaacatatatatcagcctgtgggtaaaccagatcctgcagctccaccaaagaaaccgcctcgccctggagctcccggtcatctgggaagccttgccagcctcagcagccctgctgacagctacaacgagggtgtcaagcttcagccccaggaaatcagcccccctcctactgccaacctggaccggtcgaatgataaggtgtacgagaatgtgacgggcctggtgaaagctgtcatcgagatgtccagtaaaatccagccagccccaccagaggagtatgtccctatggtgaaggaagtcggcttggccctgaggacattattggccactgtggatgagaccattcccctcctaccagccagcacccaccgagagattgagatggcacagaagctattgaactctgacctgggtgagctcatcaacaagatgaaactggcccagcagtatgtcatgaccagcctccagcaagagtacaaaaagcaaatgctgactgctgctcacgccctggctgtggatgccaaaaacttactcgatgtcattgaccaagcaagactgaaaatgcttgggcagacgagaccacactgagcctcccctaggagcacgtcttgctaccctcttttgaagatgttctctagccttccaccagcagcgaggaattaaccctgtgtcctcagtcgccagcacttacagctccaacttttttgaatgaccatctggttgaaaaatctttctcatataagtttaaccacactttgatttgggttcattttttgttttgtttttttcaatcatgatattcagaaaaatccaggatccaaaatgtggcgtttttctaagaatgaaaattatatgtaagcttttaagcatcatgaagaacaatttatgttcacattaagatacgttctaaagggggatggccaaggggtgacatcttaattcctaaactaccttagctgcatagtggaagaggagagcatgaagcaaagaattccaggaaacccaagaggctgagaattcttttgtctaccatagaattattatccagactggaatttttgtttgttagaacacccttcagttgcaatatgctaatcccactttacaaagaatataaaagctatattttgaagacttgagttatttcagaaaaaactacagccctttttgtcttacctgccttttactttcgtgtggatatgtgaagcattgggtcgggaactagctgtagaacacaactaaaaactcatgtcttttttcacagaataatgtgccagttttttgtagcaatgttatttctcttggaagcagaaatgctttgtaccagagcacctccaaactgcattgaggagaagttccagaaccatcccctttttccatttttatataatttataaagaaagattaaagccatgttgactattttacagccactggagttaactaacccttccttgtatctgtcttcccaggagagaatgaagcaaaacaggaatttggttttcttttgatgtccagttacaccatccattctgttaattttgaaaaaatataccctccctttagtttgttgggggatataaattattctcaggaagaatataatgaactgtacagttactttgacctattaaaaaggtgttaccagtaaa

SEQ ID NO: 1249 - DNA, 381 bp, Artificial Sequence
  Description of Artificial sequences:primer
  misc_feature (1)..(381): 3' terminal sequence from clone image:529844. carbonyl reductase 3(CBR3) gene.
  misc_feature (176)..(176): n is a, c, g, or t
  misc_feature (211)..(211): n is a, c, g, or t
  misc_feature (215)..(215): n is a, c, g, or t
  misc_feature (222)..(222): n is a, c, g, or t
  misc_feature (227)..(227): n is a, c, g, or t
  misc_feature (236)..(236): n is a, c, g, or t
  misc_feature (314)..(314): n is a, c, g, or t
  misc_feature (325)..(325): n is a, c, g, or t
  misc_feature (338)..(338): n is a, c, g, or t
  misc_feature (340)..(340): n is a, c, g, or t
  misc_feature (378)..(378): n is a, c, g, or t
gctccgaagcagacgtttaccagttttgcacaactttgtcatggaccaactggccttgtggctcagtggcatctggaggcaagagggccaagtagacaggggtctcagccccctcctccacagtcctgatgctgtctttcccatccatgtctgtcttcactggtcctgggcagcangcattcaccagaatcctgtcagctttcctcttctnatcnagacgcntggcnaggatcctngataagaccgtgacccccaacttggacaccccataaggtgagttgggcaagccttccctctcatgcacctcatttttngtgtcctccanaaatttttcatgngntccaccaggtctcttctgtgagtgtctcatgtggaacnttc

SEQ ID NO: 1250 - DNA, 126 bp, Artificial Sequence
  Description of Artificial sequences:primer
  misc_feature (1)..(126): 5' terminal sequence from clone image:529844. carbonyl reductase 3(CBR3) gene.
  misc_feature (70)..(70): n is a, c, g, or t
  misc_feature (93)..(93): n is a, c, g, or t
  misc_feature (102)..(102): n is a, c, g, or t
  misc_feature (111)..(111): n is a, c, g, or t
  misc_feature (113)..(113): n is a, c, g, or t
aactgcagtgaagatctgcaggaaaggttccacagtgagacactcacagaaggagacctggtggatctcntgaaaaagtttgtggaggacacnaaaaatgangtgcatgananggaaggctggccc

SEQ ID NO: 1251 - DNA, 900 bp, Artificial Sequence
  Description of Artificial sequences:primer
  misc_feature (1)..(900): carbonyl reductase 3(CBR3) gene.
gtgccccgcgctccccgctagcatgtcgtcctgcagccgcgtggcgctggtgaccggggccaacaggggcatcggcttggccatcgcgcgcgaactgtgccgacagttctctggggatgtggtgctcaccgcgcgggacgtggcgcggggccaggcggccgtgcagcagctgcaggcggagggcctgagcccgcgcttccaccaactggacatcgacgacttgcagagcatccgcgccctgcgcgacttcctgcgcaaggagtacggggggctcaacgtactggtcaacaacgcggccgtcgccttcaagagtgatgatccaatgccctttgacattaaagctgagatgacactgaagacaaatttttttgccactagaaacatgtgcaacgagttactgccgataatgaaacctcatgggagagtggtgaatatcagtagtttgcagtgtttaagggcttttgaaaactgcagtgaagatctgcaggaaaggttccacagtgagacactcacagaaggagacctggtggatctcatgaaaaagtttgtggaggacacaaaaaatgaggtgcatgagagggaaggctggcccaactcaccttatggggtgtccaagttgggggtcacggtcttatcgaggatcctggccaggcgtctggatgagaagaggaaagctgacaggattctggtgaatgcgtgctgcccaggaccagtgaagacagacatggatgggaaagacagcatcaggactgtggaggagggggctgagacccctgtctacttggccctcttgcctccagatgccactgagccacaaggccagttggtccatgacaaagttgtgcaaaactggtaaacgtctgcttcggagcttgctgcttaataaatgttggtggaatg

SEQ ID NO: 1252 - DNA, 380 bp, Artificial Sequence
  Description of Artificial sequences:primer
  misc_feature (1)..(380): 3' terminal sequence from clone image:529882. cytochrome c oxidase subunit viia polypeptide 2 (liver)(COX7A2) gene.
ttcatggtaaagactgctttattggtggcagttactacaagtcaataaatattgatccccaaagaagagctcggttatttatcagattactggtccatagagagctgaatgaaactgaaccaagcgattgctgggatgactgaagtcactcctgcttcttgggaaatgaagccacagccagctcatatatggcatatgctgttccaccaactgtaagaatcatggtggctctatacaggagggcatcagctaccccaccctttagatacagtggaatttcatcatcctcctggaacagtttttgcttctccggaacttttatttttaaaatgcctgcgggaagcagtgcttatcgtcctctgcccaatctgacgaagagc

SEQ ID NO: 1253 - DNA, 394 bp, Artificial Sequence
  Description of Artificial sequences:primer
  misc_feature (1)..(394): 5' terminal sequence from clone image:529882. cytochrome c oxidase subunit viia polypeptide 2 (liver)(COX7A2) gene.
atgctgcggaatctgctggctcttcgtcagattgggcagaggacgataagcactgcttcccgcagcattttaaaaataaagttccggagaagcaaaaactgttccaggaggatgatgaaattccactgtatctaaagggtggggtagctgatgccctcctgtatagagccaccatgattcttacagttggtggaacagcatatgccatatatgagctggctgtggcttcatttcccaagaagcaggagtgacttcagtcatcccagcaatcgcttggttcagtttcattcagctctctatggaccagtaatctgataaataaccgagctcttctttggggatcaatatttattgacttgtagtaactgccaccaataaagcagtctttaccatg

SEQ ID NO: 1254 - DNA, 451 bp, Artificial Sequence
  Description of Artificial sequences:primer
  misc_feature (1)..(451): 3' terminal sequence from clone image:530034.
  misc_feature (208)..(208): n is a, c, g, or t
  misc_feature (443)..(443): n is a, c, g, or t
ttgggtgcagcgaactttattgattggtattcaagagagtagggagggctccctaggcccctcctgttattatgggggtctgggatggaaattgtgagggagatgctcagtgttgggggccgagttgggatagggcctctcttgctcagtgtccttgctggggtgggtggtccagggtttcttactccttggaggccatgtaggcatngaggtccaccaccctgttgctgtagccgtattcattgtcataccaggaaatgaagcttgacaaagttgtcattgagagcaatgccaagccccggcatcgaaggtggaagaattgggagtttgctgttgaagtcgcaggagacaacctggttcctcaagtgtaaccccaagatggcccttcagtggggccctcagatgcctgcttcaccacccttcttgaatgtcatcataccttnggcagggt

SEQ ID NO: 1255 - DNA, 275 bp, Artificial Sequence
  Description of Artificial sequences:primer
  misc_feature (1)..(275): 5' terminal sequence from clone image:530034.
  misc_feature (215)..(215): n is a, c, g, or t
  misc_feature (224)..(224): n is a, c, g, or t
  misc_feature (228)..(228): n is a, c, g, or t
  misc_feature (241)..(241): n is a, c, g, or t
  misc_feature (249)..(249): n is a, c, g, or t
  misc_feature (264)..(264): n is a, c, g, or t
catcttcttgtgcagtgccagcctcgtcccgtagacaaaatggtgaaggtcggtgtgaacggatttggccgtattgggcgcctggtcaccagggctgccatttgcagtggcaaagtttgagagatttgttgccatcaacgaccccttcattgacctcaactacatggtctacatgttccagtatgactccactcagggcaaaattcaacgggcanagtcaaggncganaatgggaagcttntcatcaanggggaagcccataancattttccagg

SEQ ID NO: 1256 - DNA, 478 bp, Artificial Sequence
  Description of Artificial sequences:primer
  misc_feature (1)..(478): 3' terminal sequence from clone image:530037.
  misc_feature (295)..(295): n is a, c, g, or t
  misc_feature (301)..(301): n is a, c, g, or t
  misc_feature (348)..(348): n is a, c, g, or t
  misc_feature (438)..(438): n is a, c, g, or t
  misc_feature (455)..(455): n is a, c, g, or t
  misc_feature (478)..(478): n is a, c, g, or t
ttaaatcaggactgtccaacaaaaacattgctagccattcatgatctgaatttggtgtgtgaattaaattatggtgtacattaaaagccatgagacatttgttttgtaataaataaggcagtggaattactcattagtagcctttttaagataagctattaggtctgccctttctcccttcttcttaattccagcgaagatcatttttgttccagggatgtactttttgggattctccaaatactccatcagggtatcctctccccaggtgatgcctttgttcttgttggcatcnggtgtnaagagaatcccagcaaggcctgggcctggctttccggcccgaaacangaccgttggaagattttgggtcccagtccttatggcttggccttcccctttttccaaaagtggtggccacttggggcacacttctggaancaaaaatcttccttggncctttttcaacatcaccccattn

SEQ ID NO: 1257 - DNA, 449 bp, Artificial Sequence
  Description of Artificial sequences:primer
  misc_feature (1)..(449): 5' terminal sequence from clone image:530037.
  misc_feature (8)..(8): n is a, c, g, or t
  misc_feature (11)..(11): n is a, c, g, or t
  misc_feature (69)..(69): n is a, c, g, or t
  misc_feature (203)..(203): n is a, c, g, or t
  misc_feature (268)..(268): n is a, c, g, or t
  misc_feature (304)..(304): n is a, c, g, or t
  misc_feature (361)..(361): n is a, c, g, or t
  misc_feature (377)..(377): n is a, c, g, or t
  misc_feature (392)..(392): n is a, c, g, or t
  misc_feature (416)..(416): n is a, c, g, or t
  misc_feature (439)..(439): n is a, c, g, or t
  misc_feature (449)..(449): n is a, c, g, or t
atgcgacngtnttgagaaagctcaggtctgggccatgatcttctccagcagagtctttttttttttttntttttttttaacatgtccctacttatagctgaagaggtggattacagactgcagcccaagttacatcagttactgtgcatttcttgattatcttaagatcacaaagggtgtgatttggacccaaatcttataanagaaaagccctatgatgaaattacgctgtgaatacccatcccgacagaatatcagcaagcctcanccaagcttgagaaggggaagcatcttcctgggtagncagaacttgagttggaatgggaaataattggcctgtgagtgactcttgggagagggngtctaatcctcctgangtggggcaagccctnccctgtgggcctctaggcagggantttaggatcctttgggttggggnaaaaaaaaan

SEQ ID NO: 1258 - DNA, 474 bp, Artificial Sequence
  Description of Artificial sequences:primer
  misc_feature (1)..(474): 3' terminal sequence from clone image:530069. ubiquitin a-52 residue ribosomal protein fusion product 1(UBA52) gene.
  misc_feature (440)..(440): n is a, c, g, or t
gctgctccagtcaatgaaagggacactttattgaggctccagggccacggggctgggcaggaggctgcccttcaaggaaagaacaaccttatttgaccttcttcttgggacgcaggttgttggtgtgaccacacttcttcttgcggcagttgacagcacgagggtgaaggcgagcatagcacttgcggcagatcatcttgtcgcagttgtatttctgggcaagctggcggagagaaggctcaataatgccacctcgcaggcgcaacaccaggtgcagggtggactctttctggatgttgtagtctgagagagtgcggccatccctccagctgtttgccggcaaatatcagacgctgcttggtcaggttgggataccctcctttgtctttgaatttttggcttttgacattctcaatggtgtcactgggctcgacctcaanggtgatggtttttgccctccgtgccgaattcctg

SEQ ID NO: 1259 - DNA, 449 bp, Artificial Sequence
  Description of Artificial sequences:primer
  misc_feature (1)..(449): 5' terminal sequence from clone image:530069. ubiquitin a-52 residue ribosomal protein fusion product 1(UBA52) gene.
gcaaaaccatcacccttgaggtcgagcccagtgacaccattgagaatgtcaaagccaaaattcaagacaaggagggtatcccacctgaccagcagcgtctgatatttgccggcaaacagctggaggatggccgcactctctcagactacaacatccagaaagagtccaccctgcacctggtgttgcgcctgcgaggtggcattattgagccttctctccgccagcttgcccagaaatacaactgcgacaagatgatctgccgcaagtgctatgctcgccttcaccctcggtgcttgtcaacttgccgcaagaagaagtgtggtcacaccaacaacctgcgtcccaagaagaaggtcaaataaggttgttctttccttgaagggcagctcctgccaggccccgtggccctggagcctcaataaagtgtcctttcattgactggagcagca

SEQ ID NO: 1260 - DNA, 315 bp, Artificial Sequence
  Description of Artificial sequences:primer
  misc_feature (1)..(315): 3' terminal sequence from clone image:530338. cytochrome c oxidase subunit viic(COX7C) gene.
ttttcacgtcataagtttattgacaaacatatctagtatggcatatgagttctagtttgatccacttccagaggctgcacctcttaaaatgctcttcatatctgttaaatggaggaactgaaacatccttatgttttaagcagttggtgtcttactacaaggaagggtgtagcaaatgcagatccaaagtacaaacacatcttagctagtaacgaccacttgttttccactgaaaatggcaaattcgctgctggaagctctgcgaaaggcgcagagaatgaggacagatgaaatggcggcacctcaccaagacct

SEQ ID NO: 1261 - DNA, 322 bp, Artificial Sequence
  Description of Artificial sequences:primer
  misc_feature (1)..(322): 5' terminal sequence from clone image:530338. cytochrome c oxidase subunit viic(COX7C) gene.
  misc_feature (72)..(72): n is a, c, g, or t
tcgtgaaaaaaaaggtcttggtgaggtgccgccatttcatctgtcctcattctctgcgcctttcgcagagcnttccagcagcgaatttgccattttcagtggaaaacaagtggtcgttactagctaagatgtgtttgtactttggatctgcatttgctacacccttccttgtagtaagacaccaactgcttaaaacataaggatgtttcagttcctccatttaacagatatgaagagcattttaagaggtgcagcctctggaagtggatcaaactagaactcatatgccatactagatatgtttgtcaataaacttatgacc

SEQ ID NO: 1262 - DNA, 448 bp, Artificial Sequence
  Description of Artificial sequences:primer
  misc_feature (1)..(448): cytochrome c oxidase subunit viic(COX7C) gene.
caaggtcgtgaaaaaaaaggtcttggtgaggtgccgccatttcatctgtcctcattctctgcgcctttcgcagagcttccagcagcggtatgttgggccagagcatccggaggttcacaacctctgtggtccgtaggagccactatgaggagggccctgggaagaatttgccattttcagtggaaaacaagtggtcgttactagctaagatgtgtttgtactttggatctgcatttgctacacccttccttgtagtaagacaccaactgcttaaaacataaggatgtttcagttcctccatttaacagatatgaagagcattttaagaggtgcagcctctggaagtggatcaaactagaactcatatgccatactagatatgtttgtcaataaacttatgacgtgaaaaaaaaaaaaaaaaaaaaaaaaaaaaaaaaaaaaaaaaaaa

SEQ ID NO: 1263 - DNA, 452 bp, Artificial Sequence
  Description of Artificial sequences:primer
  misc_feature (1)..(452): 3' terminal sequence from clone image:530368. ribosomal protein l5(RPL5) gene.
tttttttttttttagttgctgttcataagtttattatctatatctgaaaaaatcatagaaaattgctgggtttagctctcagcagcccgctcctgagctctgaggaagcttgccttcttttgagctacccgatccttcttctgagcaagggacattttgggacggttccacctcttctttttaacttctttcttgggcttcttttcatagactggattctctcgtatagcagcatgagctttcttatacatctcctccatcatgtctggagttacgctgttctttatgtattgagagaactgtttcttgtaagcatcttcatcttcttccattaagtagcgcatgtaatctgcaacattctggcccatgatgtgcttccgatgtacttctgcattaaattccttgctttcagaatcataaccagggaatcgtttggtactgtgagggataga

SEQ ID NO: 1264 - DNA, 421 bp, Artificial Sequence
  Description of Artificial sequences:primer
  misc_feature (1)..(421): 5' terminal sequence from clone image:530368. ribosomal protein l5(RPL5) gene.
  misc_feature (286)..(286): n is a, c, g, or t
  misc_feature (320)..(320): n is a, c, g, or t
  misc_feature (343)..(343): n is a, c, g, or t
  misc_feature (393)..(393): n is a, c, g, or t
  misc_feature (400)..(400): n is a, c, g, or t
  misc_feature (420)..(420): n is a, c, g, or t
agctgtggatggaggcttgtctatccctcacagtaccaaacgattccctggttatgattctgaaagcaaggaatttaatgcagaagtacatcggaagcacatcatgggccagaatgttgcagattacatgcgctacttaatggaagaagatgaagatgcttacaagaaacagttctctcaatacataaagaacagcgtaactccagacatgatggaggagatgtataagaaagctcatgctgctatacgagagaatccagtctatgaaaagaagcccaagaaagangttaaaaagaagaggtggaaccggtcccaaaatngtcccttgctcagaagaaggatngggtagctccaaaggaaggcaagcttcctccagagctcaggagcgggctngctgagngcttaaacccagcaattttnt

SEQ ID NO: 1265 - DNA, 1033 bp, Artificial Sequence
  Description of Artificial sequences:primer
  misc_feature (1)..(1033): ribosomal protein l5(RPL5) gene.
cctagcgccgctgggcctgcaggtctctgtcgagcagcggacgccggtctctgttccgcaggatggggtttgttaaagttgttaagaataaggcctactttaagagataccaagtgaaatttagaagacgacgagagggtaaaactgattattatgctcggaaacgcttggtgatacaagataaaaataaatacaacacacccaaatacaggatgatagttcgtgtgacaaacagagatatcatttgtcagattgcttatgcccgtatagagggggatatgatagtctgcgcagcgtatgcacacgaactgccaaaatatggtgtgaaggttggcctgacaaattatgctgcagcatattgtactggcctgctgctggcccgcaggcttctcaataggtttggcatggacaagatctatgaaggccaagtggaggtgactggtgatgaatacaatgtggaaagcattgatggtcagccaggtgccttcacctgctatttggatgcaggccttgccagaactaccactggcaataaagtttttggtgccctgaagggagctgtggatggaggcttgtctatccctcacagtaccaaacgattccctggttatgattctgaaagcaaggaatttaatgcagaagtacatcggaagcacatcatgggccagaatgttgcagattacatgcgctacttaatggaagaagatgaagatgcttacaagaaacagttctctcaatacataaagaacagcgtaactccagacatgatggaggagatgtataagaaagctcatgctgctatacgagagaatccagtctatgaaaagaagcccaagaaagaagttaaaaagaagaggtggaaccgtcccaaaatgtcccttgctcagaagaaggatcgggtagctcaaaagaaggcaagcttcctcagagctcaggagcgggctgctgagagctaaacccagcaattttctatgattttttcagatatagataataaacttatgaacagcaactaaaaaaaaaaaaaaaaaaa

SEQ ID NO: 1266 - DNA, 417 bp, Artificial Sequence
  Description of Artificial sequences:primer
  misc_feature (1)..(417): 3' terminal sequence from clone image:53061. fly-like putative organic ion transporter 1(FLIPT1) gene.
  misc_feature (49)..(49): n is a, c, g, or t
  misc_feature (125)..(125): n is a, c, g, or t
  misc_feature (359)..(359): n is a, c, g, or t
tttttttttaagttttccaataatttaatcaatgcaaatatacacatanacacattctctacatcaatagtattcaacagtttttatcaaaaggagaaaattttgattttataaaggcagtgganataaaaaacagtaattattaagttttgctcaaggaccatctagaaggaaaatttagtgacacatctgaaataagcaactgatggccagcctagccttattaagtaacacatattcaaattgtagatctccccctcctatcttccaccccatagctaagaaaggaaacccagggatagaactaattgaactctattagccaggggaatcgaacccagtgccaatagagagatggnctcccaattagtcttcaaatgggacaaagtcataacactggttttctttcgatgttgg

SEQ ID NO: 1267 - DNA, 484 bp, Artificial Sequence
  Description of Artificial sequences:primer
  misc_feature (1)..(484): 5' terminal sequence from clone image:53061. fly-like putative organic ion transporter 1(FLIPT1) gene.
  misc_feature (6)..(6): n is a, c, g, or t
  misc_feature (341)..(341): n is a, c, g, or t
  misc_feature (368)..(368): n is a, c, g, or t
  misc_feature (396)..(396): n is a, c, g, or t
  misc_feature (411)..(411): n is a, c, g, or t
  misc_feature (418)..(418): n is a, c, g, or t
  misc_feature (426)..(426): n is a, c, g, or t
  misc_feature (444)..(444): n is a, c, g, or t
  misc_feature (458)..(458): n is a, c, g, or t
  misc_feature (476)..(476): n is a, c, g, or t
tcgtanaggaggttcttcatgactcctaagagagttgtaaaaatagaggcttggcttgaatgtacatagatggtacctggcatggactgatgtttttaggcacagaagttggagaagagatttcatgaaagacaacatcactgcattgagagaatagttgttaatttgtttagaatttaagttctactcagaatcataacatctggcagaacagcccaaacccacattccaaagtggtaggctcatttgtttctagagatttcatcatgtcgcttttccttcatcatgatctaaataaaggcagatatgtaaaatttctcacccttttggggggggtaagntaagctattatttaaggttttaatccnctataccctgttggggcattttgccccnatccagtttgctccnccagggntctttctnggtaccaggggttaaccntcaggccttttccnttttgttttcccgggggnaaagcacc

SEQ ID NO: 1268 - DNA, 4121 bp, Artificial Sequence
  Description of Artificial sequences:primer
  misc_feature (1)..(4121): fly-like putative organic ion transporter 1(FLIPT1) gene.
gcggccagcgcttccatccccgccccggcgggtccaagccggtgccgggcgcccaggggttgccgcgctgggcgggagggcagcgcctgagagggcggtggggtggcggggttcctgcgcgcggcccgccatggaggtggaggaggcgttcaggcggtgggggagatgggcatctaccagatgtacttgtgcttcctgctggccgtgctgctgcagctctacgtggccacggaggccatcctcattgcactggttggggccacgccatcctaccactgggacctggcagagctcctgccaaatcagagccacggtaaccagtcagctggtgaagaccaggcctttggggactggctcctgacagccaacggcagtgagatccataagcacgtgcatttcagcagcagcttcacctccatcgcctcggagtggtttttaattgccaacagatcctacaaagtcagtgcagcaagctcttttttcttcagtggtgtatttgttggagttatctcttttggtcagctttcagatcgcttcggaaggaaaaaagtctatctcacaggttttgctcttgacatcttatttgcaattgcaaatggattttccccctcatatgagttctttgcagtaactcgcttcctggtgggcatgatgaatggagggatgtcgctggtggcctttgtcttgcttaatgagtgtgtgggcaccgcctactgggcacttgcaggatcgattggcggcctcttctttgcagttggcattgcccaatatgccctgttaggatacttcatccgctcctggaggaccctagccattctggttaacctgcagggaacggtggtctttctcttatctttattcattcctgaatcacctcgttggttatactcccagggtcgactgagtgaggctgaagaggcgctgtacctcattgccaagaggaaccgcaaactcaagtgcacgttctcactaacacacccagccaacaggagctgcagggagactggaagtttcctggatctctttcgttaccgggtcctgttaggacacactttgatcctgatgttcatctggtttgtgtgcagcttggtgtattatggcctaactctgagtgcgggtgatctaggtggaagtatttatgccaacctggccctgtctggcctcatagagattcaatcttaccctctctgtatctacttgattaaccaaaaatggtttggtcggaagcgaacattatcagcatttctgtgcctaggaggactggcttgtcttattgtaatgtttcttccagaaaagaaagacacaggtgtgtttgcagtggtgaacagccattccttgtccttgctggggaagctgaccatcagtgctgcctttaacattgtttatatctacacctctgagctttaccctacagtcatcaggaatgttgggcttggaacttgttccatgttctcccgagttggtgggattattgctcccttcatcccctcactgaaatatgtgcaatggtctttaccattcattgtcttcggagccacgggtctgacctccggcctcctgagtttgttattgccggagacccttaacagtccgctgctagaaacattctccgaccttcaggtgtattcgtatcgcaggctgggagaagaagcattatctttacaggctttggacccccaacagtgtgtggacaaggagagctctttagggagtgagagtgaggaagaggaagaattttatgatgcagatgaagagactcagatgatcaagtgaagagccccagattccccctaagaagcaaaggatcgtcttttatgcctctggctaaggcaggttcttccatgactcctaagagagttgtaaaaatagaggcttggcttgaatgtacatagatggtacctggcatggactgatgtttttaggcacagaagttggagaagagatttcatgaaagacaacatcactgcattgagagaatagttgttaatttgtttagaatttaagttctactcagaatcataacatctggcagaacagcccaaacccacattccaaagtggtaggctcatttgtttctagagatttcatcatgtcgcttttccttcatcatgatctaaataaaggcagatatgtaaaatttctcaccattttggtggggtaagataagctattattaagatttaatccttataccatgttggacatttgcccctatcagttgctcctcaggaatcttctggtacaggttaacatcagcattttcattttgtatccagggaaaagcacccagaggtcatctgtgtgtcccgagaccctccagctttttcttagctgatgaaatatgagtcctcagcttggttcccagcctgctgattgacttgggctgctggtgccttgagtcccacagatgattcattaggaaaagccagatgtaccaaagcggtttactcagagtcaggggtgtagctctggctgcctgtcagctcccttggatactatattgtatgatttcttcctttcccactaatatgcacatccagaaaaatttccatctgagattctagtacttcaaaatcatgcatagtaaatgagaaagctttaagtagagggcagttaaacagtgacatgttgagcacctggaggaaaaaaaaggtgcagtttttaataagagagaaaatgaaattatctttgataaatttttgtttgttttgctttcagcattgtgccatgagggatttggacaatatttaagaacttcttgtcctagatcagccccaatctgtttaatcaaaatggaaggttcagtaatttcatgggaaaccttggtttttcattaagtgctaccaactttcaagtgaatcttgtatttgatttcctaaaatcatgtcttgaaaacatgttttctcatgaaacttgaatactatctcaaataggaatataaacctggagtcaacaagcttaggcagcattgatttaggtcactttcccagtgaggaaaatttctgtgttttcagaatttccatttctactaacctcttggagaaaaagaaattgaattagaggtaaatagaagacgtcactgtggctgcttctggaagtgctggaagcatcaccccaattggctccaaatactgtcatgttttcttgcacactgacttctggtttccactgtatcagtatgtacctttgtaattgttatttttatgtcttttatgcccttgattattagttgggctcttcataaacagaggccatctctactactgtttatttttccctgctgtgcccagaacattggcgtagacacagtaagaacctagtaaatattactgtttctagccatcagggagattgtggaactcctcccagtataatttttacaaactccaagcaaatctgacccaaactcccaaattgtcaagtcctgcttaactttctctggaaaatagaccccttctcaacatcagaataggaagagaggaagaacttacaaagacacttaaaagttattcttaaatggtggttgggcatttaaaacagtgaactaacatatatataatttttgattagttggagctttctttgtattatgagagtaatatatctcattacagaaaatttggaaactataaatttagaaacgtatcacccatacgtccaacatcgaaagaaaaccagtgttatgactttgttccatttgaagactaattgggagtccatctctctattggcactgggttcgattgcccctggctaatagagttcaattagttctatacctgggtttcctttcttagctatggggtggaagataggagggggagatctacaatttgaatatgtgttacttaataaggctaggctggccatcagttgcttatttcagatgtgtcactaaattttccttctagatggtccttgagcaaaacttaataattactgttttttatttccactgcctttataaaatcaaaattttctccttttgataaaaactgttgaatactattgatgtagagaatgtgtatatgtgtatatttgcattgattaaattattggaaaacttttcaaaaaaaaaaaaaaaaaaaaaaaaaaaaaaaaaaaagaaaaaaaaaaaaaaa

SEQ ID NO: 1269 - DNA, 483 bp, Artificial Sequence
  Description of Artificial sequences:primer
  misc_feature (1)..(483): 3' terminal sequence from clone image:530744. homo sapiens cyclophilin mrna, complete cds.
  misc_feature (404)..(404): n is a, c, g, or t
  misc_feature (445)..(445): n is a, c, g, or t
ttattcataatcataaacttaactttgcaatccagctagacttgaaggggaatgaggaaaatatggaacccaaagaacttcagtgagagcagagattacaggacattgcgagcagatggggtagggacgctctcctgagctacagaaggaatggtttgatgggtaaaatgcccgcaagtcaaaagaaattagagctgtccacagtcggaaatggtgatcttcttgctggtcttgccattcctggacccaaaacgctccatggcttccacaatgttcatgccttctttcaccttcccaaagaccacatgcttgccatccagccattcagtcttggcagtgcagataaaaaactgggaaccgtttgtgtttggtccagcatttgccatgggacaagatgccaggancctgtatgcctttagggatgaagtttctcatccttcaaatntctctcccgtagatgggacctggccgccagtggccatt

SEQ ID NO: 1270 - DNA, 458 bp, Artificial Sequence
  Description of Artificial sequences:primer
  misc_feature (1)..(458): 5' terminal sequence from clone image:530744. homo sapiens cyclophilin mrna, complete cds.
  misc_feature (49)..(49): n is a, c, g, or t
gtcaaccccaccgtgttcttcgacatcacggccgatgacgagcccttgncgcagtctccttcgagctgtttgcagacaaagttccaaagacagcagaaaactttcgagctctgagcactggagagaaaggatttggctataagggttcctcctttcacagaattattccaggattcatgtgccagggtggtgactttacacgccataatggcactggcggcaggtccatctacggagagaaatttgaggatgagaacttcatcctaaagcatacaggtcctggcatcttgtccatggcaaatgctggaccaaacacaaacggttcccagttttttatctgcactgccaagactgaatggctggatggcaagcatgtggtctttgggaaggtgaaagaaggcatgaacattgtggaagccatggagcgttttgggtccaggaatggcaagaccagcaat

SEQ ID NO: 1271 - DNA, 353 bp, Artificial Sequence
  Description of Artificial sequences:primer
  misc_feature (1)..(353): 3' terminal sequence from clone image:530773. ribosomal protein l13a(RPL13A) gene.
  misc_feature (297)..(297): n is a, c, g, or t
  misc_feature (312)..(312): n is a, c, g, or t
  misc_feature (348)..(348): n is a, c, g, or t
tttttttttttgaggcaaacagtctttattgggttcacaccaggagtccgttggtcttgaggacctctgtgaacttgcagattttcttctccacattcttttctgcctgtttccgtaacctcaagatctgcttcttcttccgatagtgcatcttggccttttccttccgtttctcctccagagtggctgtcactgcctggtacttccacccgacctcatgcgccagacgccccaggtaagcaaactttctggtaaggcttcagcgaaacaaccttgagagcagcaagggaccaccantccgctttttcttgncatagggtggagggattccattcaaaaactttgaangcgct

SEQ ID NO: 1272 - DNA, 454 bp, Artificial Sequence
  Description of Artificial sequences:primer
  misc_feature (1)..(454): 5' terminal sequence from clone image:530773. ribosomal protein l13a(RPL13A) gene.
  misc_feature (25)..(25): n is a, c, g, or t
  misc_feature (44)..(44): n is a, c, g, or t
  misc_feature (439)..(439): n is a, c, g, or t
  misc_feature (444)..(444): n is a, c, g, or t
tggtattggatggccgaggcatctntcttggccgcctgcgttcntcggccaagcaggtacttctgggccggaagtggtggtcgtacgctgtgaaggcatcaacatttctggaaacttctacagaaacaagttaaagtatctggcctttctccggaagcggatgaataccaacccctccccgaggcccctaccacttccgagcccccagccgcattttctggcgcactgtgcgaggcatgctgccccacaagaccaagagaggccaggctgccctggagcgcctcaaggtgttggatgggatcctccaccctatgacaagaaaaagcggatggtggtccctgctgctctcaaggttgtttcggctgaagcttaccagaaagtttgcttaccttggggcgtctggcgcatgaagtcgggttgaagtaccaggcagtgacangccantctggaggag

SEQ ID NO: 1273 - DNA, 1142 bp, Artificial Sequence
  Description of Artificial sequences:primer
  misc_feature (1)..(1142): ribosomal protein l13a(RPL13A) gene.
cttttccaagcggctgccgaagatggcggaggtgcaggtcctggtgcttgatggtcgaggccatctcctgggccgcctggcggccatcgtggctaaacaggtactgctgggccggaaggtggtggtcgtacgctgtgaaggcatcaacatttctggcaatttctacagaaacaagttgaagtacctggctttcctccgcaagcggatgaacaccaacccttcccgaggcccctaccacttccgggcccccagccgcatcttctggcggaccgtgcgaggtatgctgccccacaaaaccaagcgaggccaggccgctctggaccgtctcaaggtgtttgacggcatcccaccgccctacgacaagaaaaagcggatggtggttcctgctgccctcaaggtcgtgcgtctgaagcctacaagaaagtttgcctatctggggcgcctggctcacgaggttggctggaagtaccaggcagtgacagccaccctggaggagaagaggaaagagaaagccaagatccactaccggaagaagaaacagctcatgaggctacggaaacaggccgagaagaacgtggagaagaaaattgacaaatacacagaggtcctcaagacccacggactcctggtctgagcccaataaagactgttaattcctcatgcgttgcctgcccttcctccattgttgccctggaatgtacgggacccaggggcagcagcagtccaggtgccacaggcagccctgggacataggaagctgggagcaaggaaagggtcttagtcactgcctcccgaagttgcttgaaagcactcggagaattgtgcaggtgtcatttatctatgaccaataggaagagcaaccagttactatgagtgaaagggagccagaagactgattggagggccctatcttgtgagtggggcatctgttggactttccacctggtcatatactctgcagctgttagaatgtgcaagcacttggggacagcatgagcttgctgttgtacacagggtatttctagaagcagaaatagactgggaagatgcacaaccaaggggttacaggcatcgcccatgctcctcacctgtattttgtaatcagaaataaattgcttttaaagaaaaaaaaaaaaaaaaaa

SEQ ID NO: 1274 - DNA, 435 bp, Artificial Sequence
  Description of Artificial sequences:primer
  misc_feature (1)..(435): 3' terminal sequence from clone image:531366.
gggcaaaaagcccatcaagcctcctcagatatcatagtgaaccacgggctcaggctctttggtaggatcaccaccccgctccaggtacagattattgtaagggtactgcttcggacccacaggctggtaggaagggaacacgtgccctacccagaacatgaaaaccatgaaagccacaaagccgaagagatgtttacacatgacatcccaggacacaggggtaggtgacgtgtccacacgattcctgatgtacatgtctaggtcccagtgtatcggttcaccccagttcatcctgagttctgagtggtcccactgataccacggatccctctcatgctgtgatcggttggggagcatcgggtagtcgccataccccatgccatcatcggggtatggctcgtagtcttccactcgcatgttatacttcttggcggc

SEQ ID NO: 1275 - DNA, 178 bp, Artificial Sequence
  Description of Artificial sequences:primer
  misc_feature (1)..(178): 5' terminal sequence from clone image:531366.
  misc_feature (2)..(2): n is a, c, g, or t
  misc_feature (8)..(8): n is a, c, g, or t
  misc_feature (11)..(11): n is a, c, g, or t
  misc_feature (18)..(19): n is a, c, g, or t
  misc_feature (38)..(38): n is a, c, g, or t
  misc_feature (41)..(41): n is a, c, g, or t
  misc_feature (58)..(58): n is a, c, g, or t
  misc_feature (66)..(66): n is a, c, g, or t
  misc_feature (122)..(122): n is a, c, g, or t
  misc_feature (168)..(168): n is a, c, g, or t
  misc_feature (175)..(175): n is a, c, g, or t
anaccccnatnatggaanngggtattgcgaatacccgntgntccccaaacgattacancatgaganggatccgtggtatcagtgggaccactcagaactcaggatgaaatggggtgaaccgntacactgtggaccttacatgtacatcaggaatcgtgtggacacgtnaccttanccc

SEQ ID NO: 1276 - DNA, 521 bp, Artificial Sequence
  Description of Artificial sequences:primer
  misc_feature (1)..(521): 3' terminal sequence from clone image:531496. epidermal growth factor receptor substrate eps15r(EPS15R) gene.
  misc_feature (260)..(260): n is a, c, g, or t
  misc_feature (380)..(380): n is a, c, g, or t
  misc_feature (427)..(427): n is a, c, g, or t
  misc_feature (447)..(447): n is a, c, g, or t
  misc_feature (493)..(493): n is a, c, g, or t
  misc_feature (503)..(503): n is a, c, g, or t
gcggctcttttttttttttattgagaaactgtttttcttacagaagtggcagtgtagaataaataacgcgagggacagagagtgtgaggtaccaagaggctaaagaagctgggaggtttgcctttaaaaggagacaaaaatcccagggaagctgcaagcggaagggagtggggtggcccggagcggaggactcaacttacagaggtgaagtctgcaaagcccgaggcaagaggccttagaagggtttagctgcagagganggggacaaattgggtcttttccactaaacggggtccccaaacccctttttacttttggaaccgggtcgccgcttgtcaaccccgaattggctggaatggatcgggggcctcggggaaaantcttgcggaaccaaacttggctttacaaggttgtactttttaccttnggacattcttggcttgaaantccggcaaagctttcagcactatttgaaaggacccactttccgaanggaatctaangtttccaaaagggatcaa

SEQ ID NO: 1277 - DNA, 521 bp, Artificial Sequence
  Description of Artificial sequences:primer
  misc_feature (1)..(521): 5' terminal sequence from clone image:531496. epidermal growth factor receptor substrate eps15r(EPS15R) gene.
  misc_feature (40)..(40): n is a, c, g, or t
  misc_feature (373)..(373): n is a, c, g, or t
  misc_feature (467)..(467): n is a, c, g, or t
  misc_feature (481)..(481): n is a, c, g, or t
  misc_feature (504)..(504): n is a, c, g, or t
  misc_feature (517)..(517): n is a, c, g, or t
ccgcgggaagatggcggcgcgctcatccccctctcccatnagattcccactggaaattcgttgtatgaatcttattacaagcaggtcgatccggcatacacagggagggtgggggcgagtgaagctgcgctttttctaaagaagtctggcctctcggacattatccttgggaagatatgggacttggccgatccagaaggtaaagggttcttggacaaacagggtttctatgttgcactgagactggtggcctgtgcacagagtggccatgaagttaccttgagcaatctgaatttgagcatgccaccgcctaaatttcacgacaccagcagccctctgatggtcacaccgccctctgcagaggcccactggntgtgagggtggaagaaaaggccaaatttgatgggattttgaaagcctcttgcccatcaatggtttgctctctggagacaaagtcaagccagtcntcatgaactcaaantgctcttgatgtcctggcagggntgggactcagtgncatt

SEQ ID NO: 1278 - DNA, 2774 bp, Artificial Sequence
  Description of Artificial sequences:primer
  misc_feature (1)..(2774): epidermal growth factor receptor substrate eps15r(EPS15R) gene.
gggaagatggcggcgccgctcatccccctctcccagcagattcccactggaaattcgttgtatgaatcttattacaagcaggtcgatccggcatacacagggagggtgggggcgagtgaagctgcgctttttctaaagaagtctggcctctcggacattatccttgggaagatatgggacttggccgatccagaaggtaaagggttcttggacaaacagggtttctatgttgcactgagactggtggcctgtgcacagagtggccatgaagttaccttgagcaatctgaatttgagcatgccaccgcctaaatttcacgacaccagcagccctctgatggtcacaccgccctctgcagaggcccactgggctgtgagggtggaagaaaaggccaaatttgatgggatttttgaaagcctcttgcccatcaatggtttgctctctggagacaaagtcaagccagtcctcatgaactcaaagctgcctcttgatgtcctgggcagggtctgggacctcagtgacattgacaaggatgggcacttggatcgagatgagttcgctgtggccatgcacttggtgtaccgagccctggagaaggagcccgtgccctccgccctgcccccgtccctcatcccaccctccaagagaaagaagactgtgttccctggcgccgtccccgtcctgcctgccagccccccaccaaaagacagcctccgctccacgccgtcccacggcagcgtcagcagcctcaacagcacagggagcctgtcccccaagcacagcctcaagcaaacacagccaacagtgaactgggtggtgcccgtggcagacaagatgcgatttgatgagatattcctgaagaccgacctggacctggatggctacgtgagtggccaggaggtgaaggagatcttcatgcactcgggcctcacccagaaccttctagcacacatatgggccctggccgatacgaggcaaacggggaagttaagcaaagaccaattcgcgttagctatgtatttcattcagcagaaggtcagtaaaggcatcgaccctcctcaagtcctctcgccggacatggtcccgccttcggagagaggcacgcccggcccggacagttcaggctctctcggctccggggagtttactggcgtgaaggagcttgatgacatcagtcaagagattgcccagttacaaagagagaaatattcactggaacaagacattcgagaaaaggaagaggcaatcagacagaaaaccagcgaggtgcaggaattacaaaatgacctagaccgggaaacaagcagtttgcaggagctcgaggctcagaaacaggatgctcaagaccgcctggacgagatggaccagcagaaggccaagctccgagacatgctgagcgacgtccggcagaagtgccaggatgagactcagatgatctcatcactgaaaacgcaaatccaatctcaggaatctgacttaaagtcccaggaagacgatctgaaccgagccaagtcggagctgaaccgattgcagcaggaggaaacccagctggagcagagcattcaggctgggcgagtccagctggaaaccatcatcaagtccctgaagtcaacgcaagacgaaatcaaccaggcaaggagcaaactttcccagctgcatgaaagccgccaggaggcccacaggagcctggagcagtatgaccaggtgctcgatggagcccatggtgccagcctgaccgacctggccaacctgagcgaaggcgtctccctggcagagaggggcagttttggagccatggatgatcctttcaaaaataaagccttgttatttagcaacaacacgcaagagttgcatccggatcctttccagacagaagaccccttcaaatctgacccatttaaaggagctgaccccttcaaaggcgacccgttccagaatgacccctttgcagaacagcagacaacttcaacagatccatttggaggggaccctttcaaagaaagtgacccattccgtggctctgccactgacgacttcttcaagaaacagacaaagaatgacccatttacctcggatccattcacgaaaaacccttccttaccttcgaagctcgacccctttgaatccagtgatcccttttcatcctccagtgtctcctcaaaaggatcagatccctttggaaccttagatcccttcggaagtgggtccttcaatagtgctgaaggctttgccgacttcagccagatgtccaagcccccaccttctgggcctttcacctcctccttgggaggggcaggattctcagatgacccctttaaaagtaaacaggacactcctgctctgcctccgaagaaacctgctcctccacggcctaaaccgcccagcggtaaaagtacacctgtaagccagcttggttccgcagactttcccgaggcccccgatccattccagccactcggggctgacagcggcgacccgttccaaagtaaaaaggggtttggggacccgtttagtggaaaagacccatttgtcccctcctctgcagctaaaccttctaaggcctctgcctcgggctttgcagacttcacctctgtaagttgagtcctccgcctccgggccaccccactcccttccgcttgcagcttccctgggatttttgtctccttttaaaggcaaacctcccagcttctttagcctcttggtacctcacactctctgtccctcgcgttatttattctacactgccacttctgtaagaaaaacagtttctcaat

SEQ ID NO: 1279 - DNA, 461 bp, Artificial Sequence
  Description of Artificial sequences:primer
  misc_feature (1)..(461): 3' terminal sequence from clone image:53227. stathmin 1/oncoprotein 18(STMN1) gene.
  misc_feature (324)..(324): n is a, c, g, or t
  misc_feature (390)..(390): n is a, c, g, or t
  misc_feature (409)..(409): n is a, c, g, or t
tttttttttaacagcactgtgcagttttattaaccattcaagtccagtagcatctggtaagattgggacagaattgggattgaaaagtgaacagatattcagcatctaacagttcaaaagaagccactacatactcttttcacaaatatgttttcacagagccaatacagtactagccattaacccagtacaccaagtgtactgaagtagaaaagatgcaacaagaaaaatagctacattagaaagaccaacactttagaaaaagagtaaaacactttcagtttctcccctttagcccctaaaacaacatcttacagtctgggntctgggatctacctatacagtcctacattaggcttcttaaaatatttgtcagggagggggaaaaanttaaaatgacactgggccngttacagtcttttgggggtattttggggaggggggatgggggggaggaaatt

SEQ ID NO: 1280 - DNA, 505 bp, Artificial Sequence
  Description of Artificial sequences:primer
  misc_feature (1)..(505): 5' terminal sequence from clone image:53227. stathmin 1/oncoprotein 18(STMN1) gene.
  misc_feature (40)..(40): n is a, c, g, or t
  misc_feature (81)..(81): n is a, c, g, or t
  misc_feature (218)..(218): n is a, c, g, or t
  misc_feature (394)..(394): n is a, c, g, or t
  misc_feature (476)..(476): n is a, c, g, or t
  misc_feature (496)..(496): n is a, c, g, or t
aatacactgcctgtcgcttgtcttctattaccatggcttnttctgatatcaggtgaaagaactggagaagcgtgcctcagncacgggttttgagctgattctcagccctcggtcaaaagaatctgttccagaattccccctttcccctccaaagaagaaggatctttccctggaggaaattcagaagaaattagaagctgcagaagaaagacgcaagncccatgaagctgaggtcttgaagcagctggctgagaaacgagagcacgagaaagaagtgcttcagaaggcaatagaagagaacaacaacttcagtaaaatggcagaagagaaactgacccacaaaatgggaagctaattaaagagaaccgaggaggcacaaatggctgccaaactnggaacgtttgcgagaggaaggattaagcacattttaaggaagtgcgggaaggaaccaaaggattcccaaaggaccctgcttnacgaggactttaaggttganttattttgt

SEQ ID NO: 1281 - DNA, 1436 bp, Artificial Sequence
  Description of Artificial sequences:primer
  misc_feature (1)..(1436): stathmin 1/oncoprotein 18(STMN1) gene.
agtgtggtcaggcggctcggactgagcaggactttccttatcccagttgattgtgcagaatacactgcctatcgcttgtcttctattcaccatggcttcttctgatatccaggtgaaagaactggagaagcgtgcctcaggccaggcttttgagctgattctcagccctcggtcaaaagaatctgttccagaattccccctttcccctccaaagaagaaggatctttccctggaggaaattcagaagaaattagaagctgcagaagaaagacgcaagtcccatgaagctgaggtcttgaagcagctggctgagaaacgagagcacgagaaagaagtgcttcagaaggcaatagaagagaacaacaacttcagtaaaatggcagaagagaaactgacccacaaaatggaagctaataaagagaaccgagaggcacaaatggctgccaaactggaacgtttgcgagagaaggataagcacattgaagaagtgcggaagaacaaagaatccaaagaccctgctgacgagactgaagctgactaatttgttctgagaactgactttctccccatccccttcctaaatatccaaagactgtactggccagtgtcattttattttttccctcctgacaaatattttagaagctaatgtaggactgtataggtagatccagatccagactgtaagatgttgttttaggggctaaaggggagaaactgaaagtgttttactctttttctaaagtgttggtctttctaatgtagctatttttcttgttgcatcttttctacttcagtacacttggtgtactgggttaatggctagtactgtattggctctgtgaaaacatatttgtgaaaagagtatgtagtggcttcttttgaactgttagatgctgaatatctgttcacttttcaatcccaattctgtcccaatcttaccagatgctactggacttgaatggttaataaaactgcacagtgctgttggtggcagtgacttcttttgagttaggttaataaatcaagccatagagcccctcctggttgatacttgttccagatggggcctttggggctggtagaaatacccaacgcacaaatgaccgcacgttctctgccccgtttcttgccccagtgtggtttgcattgtctccttccacaatgactgctttgtttggatgcctcagcccaggtcagctgttactttctttcagatgtttatttgcaaacaaccattttttgttctgtgtcccttttaaaaggcagattaaaagcacaagcgtgtttctagagaacagttgagagagaatctcaagattctacttggtggtttgcttgctctacgttacaggtggggcatgtcctcatcctttcctgccataaaagctatgacacgagaatcagaatattaataaaactttatgtactgctgt

SEQ ID NO: 1282 - DNA, 424 bp, Artificial Sequence
  Description of Artificial sequences:primer
  misc_feature (1)..(424): 3' terminal sequence from clone image:53316. malate dehydrogenase 1, nad (soluble)(MDH1) gene.
  misc_feature (283)..(283): n is a, c, g, or t
ttttttttcatttgaatatatatttatttagaatgcacactaacagcatgacgataaactgtcattcacaaacctgtaccaagaagcacgtaatctttaaaatgtgttgtttttcacaagtaatttaagtatagcattattattatttggtacttgagtcaaagacgacatttagattcttcagctttgaagcatttagtaacatcattgtctagtcaggcagaggaaagaaattcaaaagcactttctttttcttctgtcagttcctttgcagtaagatccntcttctcacgtgaggaaatcattaataggggagaccttcaaccaaacttccaggggcttattcttggattacaacagggggaatgaggtaggaggcaggatccatcaggggaaccacccataggggaggttggcccatcag

SEQ ID NO: 1283 - DNA, 1268 bp, Artificial Sequence
  Description of Artificial sequences:primer
  misc_feature (1)..(1268): malate dehydrogenase 1, nad (soluble)(MDH1) gene.
ctgactctctgaggctcattttgcagttgttgaaattgtccccgcagttttcaatcatgtctgaaccaatcagagtccttgtgactggagcagctggtcaaattgcatattcactgctgtacagtattggaaatggatctgtctttggtaaagatcagcctataattcttgtgctgttggatatcacccccatgatgggtgtcctggacggtgtcctaatggaactgcaagactgtgcccttcccctcctgaaagatgtcatcgcaacagataaagaagacgttgccttcaaagacctggatgtggccattcttgtgggctccatgccaagaagggaaggcatggagagaaaagatttactgaaagcaaatgtgaaaatcttcaaatcccagggtgcagccttagataaatacgccaagaagtcagttaaggttattgttgtgggtaatccagccaataccaactgcctgactgcttccaagtcagctccatccatccccaaggagaacttcagttgcttgactcgtttggatcacaaccgagctaaagctcaaattgctcttaaacttggtgtgactgctaatgatgtaaagaatgtcattatctggggaaaccattcctcgactcagtatccagatgtcaaccatgccaaggtgaaattgcaaggaaaggaagttggtgtttatgaagctctgaaagatgacagctggctcaagggagaatttgtcacgactgtgcagcagcgtggcgctgctgtcatcaaggctcgaaaactatccagtgccatgtctgctgcaaaagccatctgtgaccacgtcagggacatctggtttggaaccccagagggagagtttgtgtccatgggtgttatctctgatggcaactcctatggtgttcctgatgatctgctctactcattccctgttgtaatcaagaataagacctggaagtttgttgaaggtctccctattaatgatttctcacgtgagaagatggatcttactgcaaaggaactgacagaagaaaaagaaagtgcttttgaatttctttcctctgcctgactagacaatgatgttactaaatgcttcaaagctgaagaatctaaatgtcgtctttgactcaagtaccaaataataataatgctatacttaaattacttgtgaaaaacaacacattttaaagattacgtgcttcttggtacaggtttgtgaatgacagtttatcgtcatgctgttagtgtgcattctaaataaatatatattcaaatg

SEQ ID NO: 1284 - DNA, 455 bp, Artificial Sequence
  Description of Artificial sequences:primer
  misc_feature (1)..(455): 3' terminal sequence from clone image:53331. loc350717.
  misc_feature (395)..(395): n is a, c, g, or t
  misc_feature (418)..(418): n is a, c, g, or t
  misc_feature (438)..(438): n is a, c, g, or t
  misc_feature (445)..(445): n is a, c, g, or t
ttttttttttaatttcaaagatacatgaaaatcgttttatttatttaacaaacacaaacaattgaacaaacaatggaagcaagtccttttgcctaaaggaacacagagggtcatgcggatgttgctcctccaaggatttcggtgttccccaacggctagttttgggtctagttcttctggaagatcttattcttggggagctacaggttctggcgtttggggctctttcaggttctatctccattttcccctcaattcctccccattctgctataataaaaaaaaattctcacctccggaagatcccgcctgtgcctccccgccagcctttcaggagggtctggacgtctggtccacccgctccccgggcttctttccccagcttttgctttttnccctcccctggctccccgccctncgggcctcagggaacccgancaaccgnccagcttgag

SEQ ID NO: 1285 - DNA, 575 bp, Artificial Sequence
  Description of Artificial sequences:primer
  misc_feature (1)..(575): 3' terminal sequence from clone image:544680. transcriptional regulator protein(HCNGP) gene.
  misc_feature (316)..(316): n is a, c, g, or t
  misc_feature (320)..(320): n is a, c, g, or t
  misc_feature (375)..(375): n is a, c, g, or t
  misc_feature (512)..(512): n is a, c, g, or t
tttttttttgtaagaatacggcacttttaataggcggcagaccccaggtggtgcgtggacagaccctgtccacagcgcctggctcccgtgctgcctgtccttccatctggaatgccaaacagaagctcctctcaggtggcatcttggggagtaggtcccagtcctgaaatatacaaagtggcgcctcccactgggcagtggtcactgggctgcacggtcctttcaagtcctagggtggcccctcaggtcactgcttggccttcttcacaatggtgcccacagcagagatgacggtggtcttggagccgctgggctnggtnggtgaccgtgacaacagctgggcagggtggctgtggtggtgaggatggtgggctnggctatccgttgtcactggggatagccgaatcccacttgctctttctcttctgagcatctgcaacagcttgtgctggcaagtggtagtggtggtggacgtggccttggtcgtgggtgccttttttggtgcccgtcanaaactcaaatttttggttccgctccttttttggcctttttccaatttgtccaatctcaaattt

SEQ ID NO: 1286 - DNA, 538 bp, Artificial Sequence
  Description of Artificial sequences:primer
  misc_feature (1)..(538): 5' terminal sequence from clone image:544680. transcriptional regulator protein(HCNGP) gene.
  misc_feature (483)..(483): n is a, c, g, or t
  misc_feature (523)..(523): n is a, c, g, or t
  misc_feature (536)..(536): n is a, c, g, or t
gacgattcagagactgaaaaacctgaggctgatgacccaaaggataatacagaagcagaaaagcgagacccccaggaactcgtggcctccttttctgaaagagttcggaacatgtcgcctgatgaaatcaagatcccgccagaaccccctggcagatgttcaaatcacttgcaagacaagatccagaagctttatgaacgaaagataaaggagggaatggatatgaactacattatccaaaggaagaaagaatttcggaaccctagcatctaccgagaagcttgatccagttctgttgccattgacgagcttggcaccaactacccaaaggatatgtttgatccccatggctggtctgaggactcctactatgaggcattagccaaggcccagaaaattgagatggacaaattggaaaaggccaaaagggagcgaacaaaaatttgagttttgtgacgggcaccaaaaaaggcaccacgaccnacgccacgttcaccaccactaccactgccagcacagctgnttgcagatgctcnga

SEQ ID NO: 1287 - DNA, 2454 bp, Artificial Sequence
  Description of Artificial sequences:primer
  misc_feature (1)..(2454): transcriptional regulator protein(HCNGP) gene.
ggctgtgggaataagatggcggggaagaagaatgttctgtcgtctctcgcagtttacgcggaagattcagagcccgagtctgatggcgaggctggaatcgaggcggtgggcagcgcggctgaggagaaaggcggattggtatctgatgcctatggggaggatgacttttctcgtctagggggtgatgaagatggttatgaagaagaagaagatgagaacagtagacagtcggaagatgacgattcagagactgaaaaacctgaggctgatgacccaaaggataatacagaagcagaaaagcgagacccccaggaactcgtggcctccttttctgaaagagttcggaacatgtcgcctgatgaaatcaagatcccgccagaaccccctggcagatgttcaaatcacttgcaagacaagatccagaagctttatgaacgaaagataaaggagggaatggatatgaactacattatccaaaggaagaaagaatttcggaaccctagcatctacgagaagctgatccagttctgtgccattgacgagcttggcaccaactacccaaaggatatgtttgatccccatggctggtctgaggactcctactatgaggcattagccaaggcccagaaaattgagatggacaaattggaaaaggccaaaaaggagcgaacaaaaattgagtttgtgacgggcaccaaaaaaggcaccacgaccaacgccacgtccaccaccactaccactgccagcacagctgttgcagatgctcagaagagaaagagcaagtgggattcggctatcccagtgacaacgatagcccagcccaccatcctcaccaccacagccaccctgccagctgttgtcacggtcaccaccagcgccagcggctccaagaccaccgtcatctctgctgtgggcaccattgtgaagaaggccaagcagtgacctgaggggccaccctaggacttgaaaggaccgtgcagcccagtgaccactgcccagtgggaggcgccactttgtatatttcaggactgggacctactccccagatgccacctgagaggagcttctgtttggcattccagatggaaggacaggcagcacgggagccaggcgctgtggacagggtctgtccacgcaccacctggggtctgccgcctattaaaagtgccgtattcttacctcttggcatctcagatgcactggcctctcctgcattctgtttgcaggcaaatgcttcagctcacatgtcccccaagactcaatagtcttggttgggactattgcctcagggttgacaacagggtgatggaggcctgggacgctgttcagaggggtgacccaagaagtcaccgttgttatccgtgtatgcctctgggcatggacaggcgggagtccccgagccccacgtatgccccatctgccgccttgatcccaaaacccagccagttctcgggtgatggtggagctgtgctcccttgagtgcacttgagcactccccagaccagatcactttttggacacacccaggaaggcttttgaagtcaagccagtttccagaagggctggggtgagatcctgacctgtgcagagagtggggaggcgtcagcgcctggccagggctgccccagtcctttggtgcccggtgagcgcagccagcaggagctgagcagcgggggagatgaatcacctcctgccttggcgaggcggcagctcattgtttacaggcaagccctgctcctgggagggctcctgccaccccacccttcctctgtgtgttatctctgccccacagcagcccctgggcagcaccagtggccactgggctccccccggggttgaaacgggtttcccagaccaggggttcagaggagactatttacccttcatgatctttggcgattctccactggagcggaagggctgtgtgtcaaaagaaggaagccaggctgtgaagggccgtgttgctttcagtgggtgggcagaggtttagaaaggtggttctgaaatggcacctggtactcttgtgggacctggggaatataaggaactctgtgcatgaggtttcaaaaataaaaattgagtccactctccccgtacacacacactcgggcacttcaggaggtcagttctcaccccttcctcgatggggctttaaagctctggggagaagagctgctccccactcatgccccagagggactgtgaaaaggcttcctgtgacctccgatggcggcccctcattggccaagggcactgtggatgttttgtgggaggcagcatggcaccgtggaaagggcagtagacgtggagccggcacctctggtctggattccacttaaaaccagttgagtggtctcaagcccttaacctctgtaagcctgtttcttctctgaaatcacagtaataaagcgtcgtaagatggttgggaagaaaaaaaaaaaaaaaaaaaaaaaa

SEQ ID NO: 1288 - DNA, 547 bp, Artificial Sequence
  Description of Artificial sequences:primer
  misc_feature (1)..(547): 3' terminal sequence from clone image:544767.
  misc_feature (529)..(529): n is a, c, g, or t
tctatacggaatattaaacacattactgatatcccatataattctgaaggacaagccatagtggaaagaatgaatctctccctgaaacagcagttgcagaagcaaaagggggaaaacaggtactacaggacaccccataagcaattgaatcgcattattaactttaaattttttgagcctgcctaaaggccggatcttatcagcagctgaacagcatctacagaaaccagctgcaaagacagaagcagaacaactggtttggtggagagacctgataacagaaagttgggaaataggtaaaataataacttggggtagaggttatgcttatgtttctccaggactgaaccatcaagacacctggaaaccttatcatggagcgaatgctggaggaagagattccgggaggatcccgaggacccccccagttggtagccatgtccagactgatgctggaggaggacccccactggtcacgagcaacacccgtcaaacacagccatccacctgaggtcagttccagaagctngtcccgattggcagaaga

SEQ ID NO: 1289 - DNA, 76 bp, Artificial Sequence
  Description of Artificial sequences:primer
  misc_feature (1)..(76): 5' terminal sequence from clone image:544767.
  misc_feature (23)..(23): n is a, c, g, or t
  misc_feature (37)..(37): n is a, c, g, or t
  misc_feature (48)..(48): n is a, c, g, or t
  misc_feature (56)..(57): n is a, c, g, or t
caaaataggacagggtgtgattnctcagtgctccttnaagggcttctntctgttgnncctggatgggcttggagta

SEQ ID NO: 1290 - DNA, 521 bp, Artificial Sequence
  Description of Artificial sequences:primer
  misc_feature (1)..(521): 3' terminal sequence from clone image:544806.
cgtttaattgaaaaacctggagaatccactccatgaaaagaccaaacgccccccacccctacattacttcatagccacttcgaatactcttcaccagacagcaggagaagataattcccaagacctccacaaaagcaatgcccagggccgctgcagccaccagcagtatgttcttccttagccatattgctatagtctccacgcagccctgggtatggatagtggattccttgaaatcattcccacagcccacagttatgttgatgcagcaagaatcggggactctgtccttggccatgccggggatgttttcccagtctgtgtagttagaagctccacagcagttattttctttctgcaatttgtccaaaatagtggctgttttgttgtctttaaggtaattctggcatctgctggctgggaagctttttattaaactctgacttcacctggtctctaaacacatagccagcaatgggcacagccacctccacaagcatgataagagacaggaagatggg

SEQ ID NO: 1291 - DNA, 512 bp, Artificial Sequence
  Description of Artificial sequences:primer
  misc_feature (1)..(512): 5' terminal sequence from clone image:544806.
  misc_feature (31)..(31): n is a, c, g, or t
  misc_feature (47)..(47): n is a, c, g, or t
  misc_feature (494)..(494): n is a, c, g, or t
gagagtactgagaagcgtcggggagcgcagnccaacagccatggcgntggaaggaggaatgaagtgtgtcaagtttttgctctacgttctcctgctggccttctgcgcctgtgcagtgggattgatcgccattggtgtagcggttcaggttgtcttgaagcaggccattacccatgagactactgctggctcgctgttgcctgtggtcatcattgcagtgggtgccttcctcttcctggtggcctttgtgggctgctgtggggcctgcaaggaagaactactgtctcatgattacatttgccatcttcctgtctcttatccatgcttgtggaggtggctgtggcatttgctggctatgtgtttagagaccaggtgaagtcagagttttaataaaagcttccaacagcagatgcagaattaccttaaagacaacaaaacagccactaatttttggacaattgcagaaaagaaaataactgctgtggagcttcctnaactaacacagacttggg

SEQ ID NO: 1292 - DNA, 428 bp, Artificial Sequence
  Description of Artificial sequences:primer
  misc_feature (1)..(428): 3' terminal sequence from clone image:544841. thymosin, beta 4, x chromosome(TMSB4X) gene.
  misc_feature (361)..(361): n is a, c, g, or t
  misc_feature (365)..(365): n is a, c, g, or t
  misc_feature (375)..(375): n is a, c, g, or t
  misc_feature (404)..(404): n is a, c, g, or t
tcaggttttaaaactttatttgcatattaaaaaaattgtgcattccaataattaaaattgtttgaacaaaaaaaaatggcactctgattaaactgcattttacatcctgcaggacatctttgaccatcttgaattttcctctctatttcatcatctcccacccagctttttccttcaccaacatgcaagttcttttccctctctgctagccagaccatcagatgggtgggagaggcaggggaggccttcctgctcagtaagttctgattctttgatgtgaaaggggcagcacagtcatttaaacttgatccaacctcttttgcatcttacaaagttaaacagctaaaagaagtaaaataangaangcaatgcccngtggaatgtacaatgcatattgggcggcnctcgcctccaattacgaattcgcc

SEQ ID NO: 1293 - DNA, 550 bp, Artificial Sequence
  Description of Artificial sequences:primer
  misc_feature (1)..(550): 5' terminal sequence from clone image:544841. thymosin, beta 4, x chromosome(TMSB4X) gene.
  misc_feature (446)..(446): n is a, c, g, or t
tcagactctcctcgttcgcgcagtcagctcggctccttccagcaaccatgtctgacaaacccgatatggctgagatcgagaaattcgataagtcgaagttgaagaaaacagaaacgcaagagaaaaatcctctgccttcaaaagaaacaattgaacaagagaagcaagctggcgaatcgtaatgaggcgagcgcgccaatatgcactgtacattccacgagcattgccttcttattttacttcttttagctgtttaactttgtaagatgcaaagaggttggatcaagtttaaatcgactgtgctgcccctttcacatcaaagaatcagaactactgagcaggaaggcctcccctgcctctcccacccatctgatggtctggctagcagagagggaaaagaacttgcatgttggtgaaggaaaaagctgggtgggagatgatgaatngagaggaaaatttcaagatggtccaagatgtcctggcaggatgtaaatggcagttttaatcagagtggcattttttttttggttcaaacaattttaattattgg

SEQ ID NO: 1294 - DNA, 556 bp, Artificial Sequence
  Description of Artificial sequences:primer
  misc_feature (1)..(556): thymosin, beta 4, x chromosome(TMSB4X) gene.
acaactcggtggtggccactgcgcagaccagacttcgctcgtactcgtgcgcctcgcttcgcttttcctccgcaaccatgtctgacaaacccgatatggctgagatcgagaaattcgataagtcgaaactgaagaagacagagacgcaagagaaaaatccactgccttccaaagaaacgattgaacaggagaagcaagcaggcgaatcgtaatgaggcgtgcgccgccaatatgcactgtacattccacaagcattgccttcttattttacttcttttagctgtttaactttgtaagatgcaaagaggttggatcaagtttaaatgactgtgctgcccctttcacatcaaagaactactgacaacgaaggccgcgctgcctttcccatctgtctatctatctggctggcagggaaggaaagaacttgcatgttggtgaaggaagaagtggggtggaagaagtggggtgggacgacagtgaaatctagagtaaaaccaagctggcccaagtgtcctgcaggctgtaatgcagtttaatcagagtgccattttttttt

SEQ ID NO: 1295 - DNA, 509 bp, Artificial Sequence
  Description of Artificial sequences:primer
  misc_feature (1)..(509): 3' terminal sequence from clone image:544875.
  misc_feature (233)..(233): n is a, c, g, or t
  misc_feature (285)..(285): n is a, c, g, or t
  misc_feature (300)..(300): n is a, c, g, or t
  misc_feature (351)..(351): n is a, c, g, or t
  misc_feature (362)..(362): n is a, c, g, or t
  misc_feature (402)..(402): n is a, c, g, or t
  misc_feature (430)..(430): n is a, c, g, or t
  misc_feature (489)..(489): n is a, c, g, or t
  misc_feature (495)..(495): n is a, c, g, or t
tataaaacacatcagaattttattgcttgaagaatacaacatatgaaatcacaagaacatcaaaattaaaagtcactaggcttcaaacatataatacatcatcagatgcagtaaaatattaattaacctgaagtctgcatcagaaagaaaaaggtatggaaaattacctaaattgtttacttgagaaacatatatttaaaacaaaataaaagaatgttacagtacaaattagnaaagccaaaagtgactaacttatttctgtagactaaactacctacctttggnacttaacctttttgnaaaaatcaattccttctattttttccaaatatgtcatgggcatatccatgnaataccttggnaataacttcaacataaaacattcagcaaaattactacccnttttggtatatggggggaggatatctgntaaatggctaaccatatgcctataatttcccctctaaaactccaaaatatgggtattangaatcnaatacttataaaca

SEQ ID NO: 1296 - DNA, 578 bp, Artificial Sequence
  Description of Artificial sequences:primer
  misc_feature (1)..(578): 5' terminal sequence from clone image:544875.
  misc_feature (540)..(540): n is a, c, g, or t
tgcactctcttctctgagcttcccggaccccaacatccctctccagggacagcctgttgagaaatcttcgtggagtggtggaccagaggcgaggagtttaaaagttggggcttgaaagacaggaagatacgatggcttcctcgtctggcaacgacgatgatctcactatccccagagctgctataaataagatgatcaaaagagactcttcctaatgtccgggtggccaacgattgcccgagagctggtagtgaactgctgcacggaattcattcaccttatatcttctgaagccaacgagatttgtaacaagtcagaaaagaagacaatttcaccagagcatgttatacaagcactggaaagtttgggctttggctcttacatcagtgaagtaaaagaagtcttacaagaatgcaagacagtagcattaaaaagaagaaaggccagttctcgtttggaaaacctcggcattcctgaagagggattattgagacagcacagggattatttgccaaagctagcagccaccagcagattggncccacaggaatggcttccaatgcagcagcagctccaac

SEQ ID NO: 1297 - DNA, 573 bp, Artificial Sequence
  Description of Artificial sequences:primer
  misc_feature (1)..(573): 3' terminal sequence from clone image:544885. ribosomal protein l5(RPL5) gene.
  misc_feature (506)..(506): n is a, c, g, or t
  misc_feature (548)..(548): n is a, c, g, or t
tagttgctgttcataagtttattatctatatctgaaaaaatcatagaaaattgctgggtttagctctcagcagcccgctcctgagctctgaggaagcttgccttcttttgagctacccgatccttcttctgagcaagggacattttgggacggttccacctcttctttttaacttctttcttgggcttcttttcatagactggattctctcgtatagcagcatgagctttcttatacatctcctccatcatgtctggagttacgctgttctttatgtattgagagaactgtttcttgtaagcatcttcatcttcttccattaagtagcgcatgtaatctgcaacattctggcccatgatgtgcttccgatgtacttctgcattaaattccttgctttcagaatcataaccagggaatcgtttggtactgtgagggatagacaagcctccatccacagctcccttcagggcaccaaaaactttaatgccagtggtagttctggcaangcctgcatccaaatagcaggtgaaggcacctggctgaccatnaatgctttccacattggaatcatca

SEQ ID NO: 1298 - DNA, 582 bp, Artificial Sequence
  Description of Artificial sequences:primer
  misc_feature (1)..(582): 5' terminal sequence from clone image:544885. ribosomal protein l5(RPL5) gene.
gccaagtggaggtgactggtgatgaatacaatgtggaaagcattgatggtcagccaggtgccttcacctgctatttggatgcaggccttgcagaactaccactggcaataaagtttttggtgccctgaagggagctgtggatggaggcttgtctatccctcacagtaccaaacgattccctggttatgattctgaaagcaaggaatttaatgcagaagtacatcggaagcacatcatgggccagaatgttgcagattacatgcgctacttaatggaagaagatgaagatgcttacaagaaacagttctctcaatacataaagaacagcgtaactccagacatgatggaggagatgtataagaaagctcatgctgctatacgagagaatccagtctatgaaaagaagcccaagaaagaagttaaaaagaagaggtggaaccgtcccaaaatgtcccttgctcagaagaaggatcgggtagctccaaagaaggcaagcttcctccagagctccaggagcgggctgctggagagcttaaccccagccattttcccatgatttttcccgatttggtaataacttat

SEQ ID NO: 1299 - DNA, 458 bp, Artificial Sequence
  Description of Artificial sequences:primer
  misc_feature (1)..(458): 3' terminal sequence from clone image:545000.
  misc_feature (442)..(442): n is a, c, g, or t
  misc_feature (451)..(451): n is a, c, g, or t
  misc_feature (453)..(453): n is a, c, g, or t
ttttttttttttttttttgtcaccacatgtttgatttattgaaatatgcggtctctacttgctctctggaatttaacaatttttaatagtttatgcagctggcttcttttcttctgtagtaggcttcttctctgctggtttcttggcaaccacctttttccctgcaggcttctgcttcttggcatccaccttctttcctttcttgcctaccgctggcttcttgtctgcagtccccttctctggaacaaccttctcggatttggttgccagtgcagtagctgctgcttccagctttttcacacgaagtttgtgatttctggcctggcgaagaatggtattcctgcgcatagtcttggcgtaagggttcagcttcaacatgattctcaggttcttcagtggaatcctcttcaagactctgcgatgaatcttcttgcgtggtgcncggaaggcncnttgga

SEQ ID NO: 1300 - DNA, 485 bp, Artificial Sequence
  Description of Artificial sequences:primer
  misc_feature (1)..(485): 5' terminal sequence from clone image:545000.
  misc_feature (198)..(198): n is a, c, g, or t
  misc_feature (395)..(395): n is a, c, g, or t
gcagaatcttgaaaagcccagaaatccaaagagccctccgagcaccacgcaagaagattcatcgcagagtcttgaagaagaatccactgaagaacctgagaatcatgttgaagctgaacccttacgccaagactatgcgcaggaataccattcttcgccaggccagaaatcacaaacttcgtgtgaaaaagctggaanagcagctactgcactggcaaccaaatccgagaaggttgttccagagaaggggactgcagacaagaagccagcggtaggcaagaaaggaaagaaggtggatgccaagaagcagaagcctgcagggaaaaaggtggttgccaagaaacccagcagagaagaagccttacttaccagaagaaaagaagccagcttgcatnaacttatttaaaatttgtttaaatttccagagagccagtttgagacccgcatattttccattaattcaacatgttggttgaccaaaaaaa

SEQ ID NO: 1301 - DNA, 397 bp, Artificial Sequence
  Description of Artificial sequences:primer
  misc_feature (1)..(397): 3' terminal sequence from clone image:545236.
  misc_feature (10)..(10): n is a, c, g, or t
tcgtcctctncgccttcgtgcgcttcgaggacccgcgagatgctgaggatgcgatctatggaagaaacggttacgattatggccagtgtcgactccgtgtggagttccccaggacttacggaggtcggggtgggtggccccgtggtgcaaggaacgggcctcctacaagacggtcagatttccgagttcttgtttcaggacttcctccatcaggcagctggcaggacctgaaagatcacatgcgagaagctggggatgtctgttatgcagacgtacagaaggacggaatggggatggttgaatatttgagaaaagaggacatggaatatgctctgcgtaaactgggatgacaccaaattccgctctcacgagggtgagacttcctacatccgagtgt

SEQ ID NO: 1302 - DNA, 394 bp, Artificial Sequence
  Description of Artificial sequences:primer
  misc_feature (1)..(394): 5' terminal sequence from clone image:545236.
  misc_feature (45)..(46): n is a, c, g, or t
  misc_feature (48)..(48): n is a, c, g, or t
  misc_feature (394)..(394): n is a, c, g, or t
actaaacatttaaaatatatttctgaacaaaacgggcccctcgcnnantcatccgagcagagcagcccatgaagatgcagcactgatttccgtcccatagtcagggtgaaaaatgtacagcttgttcctgaaccacagacacaccttctctctgcagcctaacaggtcactgctagtatggtggctctagccgaaattatgtagttccttaaaataaaaaaaataaaataaaataaaaataaaaggaaagaaaagaaaaaaaatgtcctaagactcctaatcaatctgggaatgtagactctggagcacaaagtagcccagctcatctaaaaaactgaagagacccttccttccccaccccctcagtaggggcctgaaaggagaagaagtagtn

SEQ ID NO: 1303 - DNA, 447 bp, Artificial Sequence
  Description of Artificial sequences:primer
  misc_feature (1)..(447): 3' terminal sequence from clone image:545423. hypothetical protein bc008217(LOC92906) gene.
  misc_feature (329)..(329): n is a, c, g, or t
  misc_feature (367)..(367): n is a, c, g, or t
  misc_feature (385)..(385): n is a, c, g, or t
  misc_feature (431)..(431): n is a, c, g, or t
ttggtaaaggcaataatcggaccatcgggatccatagccatcatgtctaaacgaagaagggtgttctcccaaaatggcttgtctctggcgaccctttcctctatctcgtcttcccaaatatggtttagtgtagtcccaactgtcattgtcattcctaataacatttagacgagttggccgtgcatattcaatttttagtgtgcaacatccagcatatatatcagctccattgagtgctgctttagctttctgggcacaaaggactgattcaaactcaaccattgcttgtatcccatttctcttgaatataacaatacgttgcactttgncaacaggggttggcatacagtatataaaacatccactngtaatttgggataaagcnggattcccggaattgagagcaggaaggaacttttggttggcctccnggatgggattaatcca

SEQ ID NO: 1304 - DNA, 392 bp, Artificial Sequence
  Description of Artificial sequences:primer
  misc_feature (1)..(392): 5' terminal sequence from clone image:545423. hypothetical protein bc008217(LOC92906) gene.
  misc_feature (255)..(255): n is a, c, g, or t
  misc_feature (325)..(325): n is a, c, g, or t
  misc_feature (333)..(333): n is a, c, g, or t
  misc_feature (347)..(347): n is a, c, g, or t
  misc_feature (352)..(352): n is a, c, g, or t
  misc_feature (359)..(359): n is a, c, g, or t
  misc_feature (392)..(392): n is a, c, g, or t
gaaaacatagatagtgccaaagaatgtgtgacatttgctgcagatgaacccgtgtacattgctggtcaacaggcttttttcaactattctacaagcaaaaggatcactcggccaggaaatactgatgatccatcaggaggcaacaaagttcttctgctctcaattcagaatccgctttatccaattacagtggatgttttatatactgtatgcaaccctgttggcaaagtgcaacgtattgttatattcaagagnaaatgggatacaagcaatggttgagttttgaatcagtcctttgtgcccagaaagctaaaagcagcactcnatggggcntgaaataaatgccnggatntttgccncctaaaaaattggaatttgcccgggcccaaacn

SEQ ID NO: 1305 - DNA, 467 bp, Artificial Sequence
  Description of Artificial sequences:primer
  misc_feature (1)..(467): 3' terminal sequence from clone image:545580. ribosomal protein l29(RPL29) gene.
  misc_feature (80)..(80): n is a, c, g, or t
  misc_feature (83)..(83): n is a, c, g, or t
  misc_feature (205)..(205): n is a, c, g, or t
  misc_feature (241)..(241): n is a, c, g, or t
  misc_feature (255)..(256): n is a, c, g, or t
  misc_feature (347)..(347): n is a, c, g, or t
  misc_feature (448)..(448): n is a, c, g, or t
  misc_feature (466)..(466): n is a, c, g, or t
tttttttttttcctgcctcaggtttatttgtacaaatagcacaggaggaccccagccccatgcagatggtagcccagggnggngggtggggggtcgcaccagtccttctgtcctcatgttggcagagatatctactctgaagcctttgtaggggcctgggtacgtttgggagcctgagctggaactgaagctggggctgcagctngggccttggtttgatccttggccttggcttggcttnggctttggctttgnnggcacagcctgagccccttggaatacgggcacgagcacgcttcccaagcttggggtgggcaatgtaggcaagtcgatcgagcttgcggctngacaccctttggggattcttggggctttaacctctcttggggcttttacgagggccttgatagcctcggcacgtgcactcatggccttggcattgttggcntgcatcttctttaagccnt

SEQ ID NO: 1306 - DNA, 455 bp, Artificial Sequence
  Description of Artificial sequences:primer
  misc_feature (1)..(455): 5' terminal sequence from clone image:545580. ribosomal protein l29(RPL29) gene.
  misc_feature (1)..(1): n is a, c, g, or t
  misc_feature (401)..(401): n is a, c, g, or t
  misc_feature (453)..(453): n is a, c, g, or t
nccacaccacacacaaccagtcccgaaaatggcacagaaatggtatcaagaaaccccgatcacaaagatacgaatctcttaagggggtggaccccaagttcctgaggaacatgcgctttgccaagaagcacaacaaaaagggcctaaagaagatgcaggccaacaatgccaaggccatgagtgcacgtgccgaggctatcaaggccctcgtaaagcccaaggaggttaagcccaagatcccaaagggtgtcagccgcaagctcgatcgacttgcctacattgcccaccccaagcttgggaagcgtgctcgtgcccgtatttgccaaggggctcaggctgtgcgggcccaaaggcaaaggccaaaggccaaagggccaagggccaaggattcaaaccaaggncccaggcttgcagccccagctttcagtttccagcttcaggcttcccaaacgntt

SEQ ID NO: 1307 - DNA, 737 bp, Artificial Sequence
  Description of Artificial sequences:primer
  misc_feature (1)..(737): ribosomal protein l29(RPL29) gene.
ttccggcgttgttgaccctatttcccgtgctgcaccgcagcccctttctcttccggttctaggcgcttcgggagccgcggcttatggtgcagacatggccaagtccaagaaccacaccacacacaaccagtcccgaaaatggcacagaaatggtatcaagaaaccccgatcacaaagatacgaatctcttaagggggtggaccccaagttcctgaggaacatgcgctttgccaagaagcacaacaaaaagggcctaaagaagatgcaggccaacaatgccaaggccatgagtgcacgtgccgaggctatcaaggccctcgtaaagcccaaggaggttaagcccaagatcccaaagggtgtcagccgcaagctcgatcgacttgcctacattgcccaccccaagcttgggaagcgtgctcgtgcccgtattgccaaggggctcaggctgtgccggccaaaggccaaggccaaggccaaggccaaggatcaaaccaaggcccaggctgcagccccagcttcagttccagctcaggctcccaaacgtacccaggcccctacaaaggcttcagagtagatatctctgccaacatgaggacagaaggactggtgcgaccccccacccccgcccctgggctaccatctgcatggggctggggtcctcctgtgctatttgtacaaataaacctgaggcaggaaaaaaaaaaaaaaaaaaaaaaaaaaaaaaaaaaaaaaaaaaa

SEQ ID NO: 1308 - DNA, 424 bp, Artificial Sequence
  Description of Artificial sequences:primer
  misc_feature (1)..(424): 3' terminal sequence from clone image:546351. transmembrane 9 superfamily member 2(TM9SF2) gene.
  misc_feature (2)..(2): n is a, c, g, or t
cnttttggctgcatctttatacagcttttcttcattctgaatagcatttggtcccaccagatgtattacatgtttggtttcctgtttctggtgtttatcattttggttattacctgttccgaagcaactatacttctttgctactttcacctatgtgcagaggattaccattggcagtggcgttccttccttaccagcggcttcacagctgtttacttcctgatatacgccatacactacttcttctccaaactgcagatcacggggacagcaagtacaatcctgtacttcggttatactatgataatggttttgatcttcttcctttttacaggaacaattggcttctttgcatgcttttggtttgttaccaaaatatacagtgtggtgaaagtggactgaagaagcccagtgtgtccagtta

SEQ ID NO: 1309 - DNA, 2391 bp, Artificial Sequence
  Description of Artificial sequences:primer
  misc_feature (1)..(2391): transmembrane 9 superfamily member 2(TM9SF2) gene.
cgcaaccggaactagccttctgggggccggcttggtttatctctggcggccttgtagtcgtctccgagactccccacccctccttccctcttgaccccctaggtttgattgccctttccccgaaacaactatcatgagcgcgaggctgccggtgttgtctccacctcggtggccgcggctgttgctgctgtcgctgctcctgctgggggcggttcctggcccgcgccggagcggcgctttctacctgcccggcctggcgcccgtcaacttctgcgacgaagaaaaaaagagcgacgagtgcaaggccgaaatagaactatttgtgaacagacttgattcagtggaatcagttcttccttatgaatacacagcgtttgatttttgccaagcatcagaaggaaagcgcccatctgaaaatcttggtcaggtactattcggggaaagaattgaaccttcaccatataagtttacgtttaataagaaggagacctgtaagcttgtttgtacaaaaacataccatacagagaaagctgaagacaaacaaaagttagaattcttgaaaaaaagcatgttattgaattatcaacatcactggattgtggataatatgcctgtaacgtggtgttacgatgttgaagatggtcagaggttctgtaatcctggatttcctattggctgttacattacagataaaggccatgcaaaagatgcctgtgttattagttcagatttccatgaaagagatacattttacatcttcaaccatgttgacatcaaaatatactatcatgttgttgaaactgggtccatgggagcaagattagtggctgctaaacttgaaccgaaaagcttcaaacatacccatatagataaaccagactgctcagggccccccatggacataagtaacaaggcttctggggagataaaaattgcctatacttactctgttagcttcgaggaagatgataagatcagatgggcgtctagatgggactatattctggagtctatgcctcatacccacattcagtggtttagcattatgaattccctggtcattgttctcttcttatctggaatggtagctatgattatgttacggacactgcacaaagatattgctagatataatcagatggactctacggaagatgcccaggaagaatttggctggaaacttgttcatggtgatatattccgtcctccaagaaaagggatgctgctatcagtctttctaggatccgggacacagattttaattatgacctttgtgactctatttttcgcttgcctgggatttttgtcacctgccaaccgaggagcgctgatgacgtgtgctgtggtcctgtgggtgctgctgggcacccctgcaggctatgttgctgccagattctataagtcctttggaggtgagaagtggaaaacaaatgttttattaacatcatttctttgtcctgggattgtatttgctgacttctttataatgaatctgatcctctggggagaaggatcttcagcagctattccttttgggacactggttgccatattggccctttggttctgcatatctgtgcctctgacgtttattggtgcatactttggttttaagaagaatgccattgaacacccagttcgaaccaatcagattccacgtcagattcctgaacagtcgttctacacgaagcccttgcctggtattatcatgggagggattttgccctttggctgcatctttatacaacttttcttcattctgaatagtatttggtcacaccagatgtattacatgtttggcttcctatttctggtgtttatcattttggttattacctgttctgaagcaactatacttctttgctatttccacctatgtgcagaggattatcattggcaatggcgttcattccttacgagtggctttactgcagtttatttcttaatctatgcagtacactacttcttttcaaaactgcagatcacgggaacagcaagcacaattctgtactttggttataccatgataatggttttgatcttctttctttttacaggaacaattggcttctttgcatgcttttggtttgttaccaaaatatacagtgtggtgaaggttgactgaagaagtccagtgtgtccagttaaaacagaaataaattaaactcttcatcaacaaagacctgtttttgtgactgccttgagttttatcagaattattggcctagtaatccttcagaaacaccgtaattctaaataaacctcttcccatacacctttcccccataagatctgtcttcaacactataaagcatttgtattgtgatttgattaagtatatatttggttgttctcaatgaagagcaaatttaaatattatgtgcatttgaa

SEQ ID NO: 1310 - DNA, 435 bp, Artificial Sequence
  Description of Artificial sequences:primer
  misc_feature (1)..(435): 3' terminal sequence from clone image:546439. guanine nucleotide binding protein (g protein), beta polypeptide 2-like 1(GNB2L1) gene.
  misc_feature (428)..(428): n is a, c, g, or t
tttttttttttttcagaaaagccagttttttttttatttgtaaagctctgccataaacttctagcgtgtgccaatggtcacctgccacactcgcaccaggttgtccgtgtagccagcaaacagagtctggccatcagcagaccaggccagggaggtgcactggggtggttctgccttgctgctggtactgataacttcttgcttcagttcatctacaatgatctttccctctaaatcccagatcttgatgctggggcctgtggaagcacacagccagtagcggttagggctgaagcacagggcgttgatgatgtccccaccatctagcgtgtaaaggtgtttgccttcgttgagatcccataacatggcctggccatccttgcctccagaagcacagagggatccatctggagaaacagtcaccgtgntcaaaaa

SEQ ID NO: 1311 - DNA, 326 bp, Artificial Sequence
  Description of Artificial sequences:primer
  misc_feature (1)..(326): 5' terminal sequence from clone image:546439. guanine nucleotide binding protein (g protein), beta polypeptide 2-like 1(GNB2L1) gene.
  misc_feature (65)..(65): n is a, c, g, or t
  misc_feature (298)..(298): n is a, c, g, or t
  misc_feature (324)..(324): n is a, c, g, or t
gcaggagaggttgtggtgctagtttctctaagccatccagtgccatcctcgtcgctgcaggaacnacagctctcgccgccgccatgactgagcagatgacccttcgtggcaccctcaagggccacaacggctgggtaacccagatcgctactaccccgcagttcccggacatgatcctctccgcctctcgagataagaccatcatcatgtggaaactgaccagggatgagaccaactatggaattccacagcgtgctctgcggggtcactcccactttgttagtgatgtggttatctnctcagatggccagtttgccctctcangc

SEQ ID NO: 1312 - DNA, 1093 bp, Artificial Sequence
  Description of Artificial sequences:primer
  misc_feature (1)..(1093): guanine nucleotide binding protein (g protein), beta polypeptide 2-like 1(GNB2L1) gene.
ctgcaaggcggcggcaggagaggttgtggtgctagtttctctaagccatccagtgccatcctcgtcgctgcagcgacaccgctctcgccgccgccatgactgagcagatgacccttcgtggcaccctcaagggccacaacggctgggtaacccagatcgctactaccccgcagttcccggacatgatcctctccgcctctcgagataagaccatcatcatgtggaaactgaccagggatgagaccaactatggaattccacagcgtgctctgcggggtcactcccactttgttagtgatgtggttatctcctcagatggccagtttgccctctcaggctcctgggatggaaccctgcgcctctgggatctcacaacgggcaccaccacgaggcgatttgtgggccataccaaggatgtgctgagtgtggccttctcctctgacaaccggcagattgtctctggatctcgagataaaaccatcaagctatggaataccctgggtgtgtgcaaatacactgtccaggatgagagccactcagagtgggtgtcttgtgtccgcttctcgcccaacagcagcaaccctatcatcgtctcctgtggctgggacaagctggtcaaggtatggaacctggctaactgcaagctgaagaccaaccacattggccacacaggctatctgaacacggtgactgtctctccagatggatccctctgtgcttctggaggcaaggatggccaggccatgttatgggatctcaacgaaggcaaacacctttacacgctagatggtggggacatcatcaacgccctgtgcttcagccctaaccgctactggctgtgtgctgccacaggccccagcatcaagatctgggatttagagggaaagatcattgtagatgaactgaagcaagaagttatcagtaccagcagcaaggcagaaccaccccagtgcacttccctggcctggtctgctgatggccagactctgtttgctggctacacggacaacctggtgcgagtgtggcaggtgaccattggcacacgctagaagtttatggcagagctttacaaataaaaaaaaaatggcttttc

SEQ ID NO: 1313 - DNA, 443 bp, Artificial Sequence
  Description of Artificial sequences:primer
  misc_feature (1)..(443): 3' terminal sequence from clone image:546460. was protein family, member 3(WASF3) gene.
  misc_feature (434)..(434): n is a, c, g, or t
ttagggttaaaagtgtaattttatttagatgttacttgtacataatctatagtaagatatacaaacagataaaaattgtttaacagttttttttaataccactttaaattcaatttacaacagcattggtaatactgcaagatgacagatactatgatttataaaacaaaaattacttgctactctggctgatacattcccactagtctttaatggattaatatgtatcatgtattttaattgcaaattattataaaacttttacaacctagccacttggagctcagaaaacattttgatgttctaaaaacttactgagatgaaaatgttaatttttgaatagtatccttagtaaagaaaaacatccagtgtagccaagcttacggtctggggctgacagtgcaactcacttgccttgtgctccgccgcctccnggtgtgcgc

SEQ ID NO: 1314 - DNA, 279 bp, Artificial Sequence
  Description of Artificial sequences:primer
  misc_feature (1)..(279): 5' terminal sequence from clone image:546460. was protein family, member 3(WASF3) gene.
  misc_feature (230)..(230): n is a, c, g, or t
  misc_feature (239)..(239): n is a, c, g, or t
  misc_feature (251)..(251): n is a, c, g, or t
  misc_feature (258)..(258): n is a, c, g, or t
  misc_feature (264)..(264): n is a, c, g, or t
  misc_feature (277)..(277): n is a, c, g, or t
tccagcaaattcaatttattctgaaatttaaatccagatcttttctaatatggtattacaatgaaaagaataaagagaagatttgaattttcagtttcattttcaaaaactatttaccaaaacaaatggagaagaaacatccaaaagcacatttcatttctccaaacctttgtgttttaaattatagttataaattgtaaggtaattttaaattgtccctcgtattattnctccacggncggtttaggttnaaggccncctagnctttccccccatngc

SEQ ID NO: 1315 - DNA, 4768 bp, Artificial Sequence
  Description of Artificial sequences:primer
  misc_feature (1)..(4768): was protein family, member 3(WASF3) gene.
gcggccgcggcgcggcgggaccatggagctcagagcgcagccccggcgccggcggcgggaccgcggaccgttttagttttgattgctgttaactactactgataactgagccaaagtggtgatgctacttgaggggaatttctgcaacccatagtcaacgattacatgattgtgaaccatgcctttagtgaagaggaacattgagccccggcacttgtgccggggagctctgcctgaagggattaccagcgaacttgaatgtgtaaccaatagtactcttgccgctatcatacgccagctgagcagtctgagcaaacatgctgaagacatatttggtgagttgtttaatgaggctaacaacttctacatcagagcaaattctcttcaagacagaattgatcgccttgctgtcaaagtcacccagctggattcaacagtggaagaggtctcactacaggatatcaacatgaaaaaagctttcaaaagttccacagtccaagaccagcaagtggtttcaaagaacagcattcctaatcctgttgctgatatttacaaccagagtgataagccaccgcctctgaacatcctgacaccatacagagatgacaagaaggatgggctgaagttctatactgatccttcctatttctttgacctctggaaagaaaaaatgctacaggacacagaagacaaaaggaaagagaaaaggcgtcaaaaggagcaaaagcgtatagatggcaccacccgtgaggtgaaaaaggttagaaaagccagaaacaggcgccaggagtggaatatgatggcatatgacaaagagcttagacccgacaacaggttgtctcagagtgtgtaccatggagcgtcttccgagggatccctgtccccagatactaggtcacatgcatcggacgttacggattactcttacccggctactcccaaccattctctgcacccccagcctgtgaccccttcctatgcagctggtgacgtgccaccacacgggcctgcaagccaggctgcggagcatgagtaccggcccccatctgcctcggcgaggcacatggccctcaacagacctcagcagccgccccccccgcctccccctcaggccccagaggggtcccaggcctctgcaccgatggctccagcagactacgggatgctcccagcgcagataattgagtattacaacccatccggaccacctcctccgccacctcctcctgtgattccctcagcacaaactgccttcgtcagccctctccagatgcccatgcagcccccgttccctgcatcagccagctccacgcacgcagctcctcctcacccaccctccaccgggctcctggtcacagccccgccacccccgggcccaccacctcccccgccaggccctcctggtcccgggtcttctctttcgtcctccccaatgcatggccccccagtagctgaggcgaagcggcaagagcctgcacagccaccaatcagtgatgctcgaagcgacctcctcgctgctattcgaatgggaattcaactgaaaaaggtgcaggagcagcgggagcaggaggccaagcgggagccagtggggaatgacgtggccacgatcctgtcccggcgcattgccgtggagtacagcgactctgacgacgactcagagttcgacgagaacgactggtccgactgagcaaaggccggcggagaggccgcgtgtgggagcgtgttgaagattttaagtggtctctacacccaaatagtggtattctaatcccgtagcatagcaccttttgtataaacaatgtgatattgcttctgcacatccaaaaattctgggtcttttcagtatttactgtgtaatacttaagtgccactaaacatagcaaattgtgctgcacatgaggaaataggctgtcactatcacattgtcctgaaaacagcatctgctttcctcttggccatgagagtatttagtgcagtttgggtttactcttactgatcaatataactctgcagacttgctgtgtgtttgtgaagctgcctggtgttaggtctctgcaagactaatgactatgtcagagtgatgtcttccaaccagtaagtgatattgtttcaccgctttggtttttccttttgtttttttaaaggatgtgtttctgaataagttggttttagagggaaaggttcaacaaacagggagaatccagtgtttctgctttcagtttcttggcttggtagcctctgagtgaatctgatgctctgctgaataatttcattacctctgcacatgcctgtcaaatatgaaattggaagggcccttttcaggctgggttccctgtgggcatttgcttagtaaatgcctgttgatggtttttgcaagagaattcagcagctcaacagtaatgaaagtgaagaacagagtccattttccttcctggggccattggggatgacactcaagatacttgccagtctctccagtgtgggcaccagccggccagaacagatgcgagcagtccatgactctgggagctacaccgctgagctgggcagagctgcggcacagggcctgggctgcaaaggagccctgctcctttagtttcctgacacctgtgtcctgagtgagccgcaggagttcttagctcctcagcgagcaacagagagcactttagatggcacctttcaccacttggtcagaattttaaaagcttaggtttaggtgaaagtagatattgacagctattcacctttcacggtgctggggccagattagggatcactcccgtgaggagggccttcaccctgttctagaagcacatggttgtcctcctgttgttggcacattaaatgataaaaagcacctcatgagattcccttgatcagccctgcagctgtagtacagtgctgtgccctcacctccacccttcctgttgttcccacgtgggcaataccagggacccatggggaaactcaagaatgacagcttctatattttgtaattctggatgaaagataactgtgttgaacaaacaggtgctccaggctttgattatagatacgacttcaaaaatatgctaagacgcttgacttattaaggactttaacctactcaacagtatttcatatccattgtggttagttactcagttatgttgagaagaatctggagctaaaagcagagatgtttgaggtgacggtaggaatgtgagcaggatggtgatgggggtttttgttaaaatgcatctgagcaagtcagccagccccgaagtcccctcagtgtgtgtgtctcgagtggctacctgttgggcttgtgggcagtgattgtacagagcctgtccattgggtgcagtcatgtagatctgaagccctgaaaagcctcatgtctgcatcccctttccaaggctgcttccctggtgtgtctgttctctcctctgtcccaggtgctgggagcgtcctcttcagcgtcttttcctagagctggtcaccactaggctgtcactataaattccttgaatataagtaacagttattaatgaacttctaaatttctaatttctctctctctctcttttttttttttttgttgttgttaaaaagggcctactacattggcgctattcttaggacttctgcaacttttaaagtcttacttgtctttcttgttgcttttgtattaggagttccccgtgtgggtctagaactcccctttggtaatgcttctttgtttttttatggcccttctgttctcaggatggagagaacacagaagctactatccatgtcaggatttattctatttatatcttattacaataaaattagtggcactttattcataaatattcatgagcctgttaattgttagttgtcttcctgtagctgaatcaacaagttattttcaactcaattttatgacttgcgaaaaagcttttgccctgttgtgtaccataacatttaaaagaatggaaaatgactgaaatccaatttagattatttttagagtatttttccagcaaattcaatttattctgaaatttaaatccagatcttttctaatatggtattacaatgaaaagaataaagagaagatttgaattttcagtttcattttcaaaaactatttaccaaaacaaatggagaagaaacatccaaaagcacatttcatttctccaaactttgtgttttaaattatagttataaattgtaaggtaattttaaattgtccctcgtattatttctccacgtctgttttagtttaatgtctcctaagcttttctctcatagcgtagacctagggaagggatgggaagattgcccagtccccgatggctgcgcacacaggaggcggcggagcacaaggcaagtgagtttgcactgtcagccccagaccgtaagcttggctacactgatgtttttctttactaaggatactattcaaaaattaacattttcatctcagtaagtttttagaacatcaaaatgttttctgagctccaagtggctaggttgtaaaagttttataataatttgcaattaaaatacatgatacatattaatccattaaagactagtgggaatgtatcagccagagtagcaagtaatttttgttttataaatcatagtatctgtcatcttgcagtattaccaatgctgttgtaaattgaatttaaagtggtattaaaaaaaactgttaaacaatttttatctgtttgtatatcttactatagattatgtacaagtaacatctaaataaaattacacttttaaccct

SEQ ID NO: 1316 - DNA, 448 bp, Artificial Sequence
  Description of Artificial sequences:primer
  misc_feature (1)..(448): 3' terminal sequence from clone image:546545. rab7, member ras oncogene family(RAB7) gene.
ttttttatcattgttcttgttcaattttattggcattgcgttcatctctttacagaagaactcagcccacaccctagaatgtagacctttggaaaaaggagaagtgctccgttaagcaagctacaatgcaggggcagatcctaggaagggagcagaactgccagggttccaaccaaagaaagaggttaattaataatgggcaatattggggagatgggtggggaaaagaggaaaaagctccgctaacctaagaataccacaaccctgaaaggagcgccttctagaacaaaggtaaaatcactaggacagatctgttagggttttcctttcactcttgtagtagaatgctgatctaacgggagttttgaagtgtggagcaggggggaaaaaaagaaagaaaatgagaattttaatttttgaaattacggcaatttatccattgcacata

SEQ ID NO: 1317 - DNA, 302 bp, Artificial Sequence
  Description of Artificial sequences:primer
  misc_feature (1)..(302): 5' terminal sequence from clone image:546545. rab7, member ras oncogene family(RAB7) gene.
ggttccagtctcatcggtgtggccttctacagaggtgcagactgctgcgttctggtatttgatgtgactgcccccaacacattcaaaaccctagatagctggagagatgagtttctcatccaggccagtccccgagatcctgaaaacttcccatttgttgtgttgggaaacaagattgacctcgaaaacagacaagtggccacaaagcgggcacaggcctgggtgctacagcaaaaacaacattccctactttgaagaccagtgccaaggaggccatcaacgtggagcaggcgttccagacg

SEQ ID NO: 1318 - DNA, 1498 bp, Artificial Sequence
  Description of Artificial sequences:primer
  misc_feature (1)..(1498): rab7, member ras oncogene family(RAB7) gene.
ggcacgaggataaagcctgaggcggcggcagcggcggagttggcggcttggagagctcgggagagttccctggaaccagaacttggaccttctcgcttctgtcctccgtttagtctcctcctcggcgggagccctcgcgacgcgcccggcccggagcccccagcgcagcggccgcgtttgaaggatgacctctaggaagaaagtgttgctgaaggttatcatcctgggagattctggagtcgggaagacatcactcatgaaccagtatgtgaataagaaattcagcaatcagtacaaagccacaataggagctgactttctgaccaaggaggtgatggtggatgacaggctagtcacaatgcagatatgggacacagcaggacaggaacggttccagtctctcggtgtggccttctacagaggtgcagactgctgcgttctggtatttgatgtgactgcccccaacacattcaaaaccctagatagctggagagatgagtttctcatccaggccagtccccgagatcctgaaaacttcccatttgttgtgttgggaaacaagattgacctcgaaaacagacaagtggccacaaagcgggcacaggcctggtgctacagcaaaaacaacattccctactttgagaccagtgccaaggaggccatcaacgtggagcaggcgttccagacgattgcacggaatgcacttaagcaggaaacggaggtggagctgtacaacgaatttcctgaacctatcaaactggacaagaatgaccgggccaaggcctcggcagaaagctgcagttgctgagggggcagtgagagttgagcacagagtccttcacaaaccaagaacacacgtaggccttcaacacaattcccctctcctcttccaaacaaaacatacattgatctctcacatccagctgccaaaagaaaaccccatcaaacacagttacaccccacatatctcgcacacacacacacacacgcacacacacacacacagatctgacgtaatcaaactccagcccttgcccgtgatggctccttggggtctgcctgcccacccacatgagcccgcgagtatggcagcaggacaagccagcggtggaagtcattctgatatggagttggcattggaagcttattctttttgttcactggagagagagagaactgtttacagttaatctgtgtctaattatctgattttttttattggtcttgtggtctttttaccccccctttcccctccctccttgaaggctaccccttgggaaggctggtgccccatgccccattacaggctcacacccagtctgatcaggctgagttttgtatgtatctatctgttaatgcttgttacttttaactaatcagatctttttacagtatccatttattatgtaatgcttcttagaaaagaatcttatagtacatgttaatatatgcaaccaattaaaatgtataaattagtgtaaaaaaaaaaaaaaaaaaa

SEQ ID NO: 1319 - DNA, 446 bp, Artificial Sequence
  Description of Artificial sequences:primer
  misc_feature (1)..(446): 3' terminal sequence from clone image:546664. ribosomal protein s8(RPS8) gene.
acagatagaacagcagacacctttattacactacacatgaggctcatttgcctttccgggctttgatcttccgcagatagaactccagctccttgccttcgagcacatagccgtctgctctgccacactggcctggtcgtgaggcaatacaggctagaagcttgccctgctggaactgctcctccaggaggctgctgattttggcattctttttcctttcatcgtatttcttttgaattttctttgatcgttttttgtttaaaatctcttcctcctcaggagtcagcttggcccccttcttgcggcccaggggaagtgcatagtgggactcgtaccactgtcggtacggcgtgctgtcaataagcacgatgcagttcttcaccagggtcttggtgcggacaagctcgttgttggatgcattgtagacaacatcaatgatccttgtt

SEQ ID NO: 1320 - DNA, 290 bp, Artificial Sequence
  Description of Artificial sequences:primer
  misc_feature (1)..(290): 5' terminal sequence from clone image:546664. ribosomal protein s8(RPS8) gene.
  misc_feature (13)..(13): n is a, c, g, or t
ttttttttgcttncaaaataatttatttcgtttataaaaactgacctaatagtgagtgcatatttacattttaaatcattacccaatttagcgagaaacaattcaatgcaaactacaaaatagcttataaaggcagacttatacaggacaccaaaaataataaacagacttactaaaataagtaggaaacaatttaaatagtcactgtattttaagcaggaatccacataagtcttaagacttaaggatttatacaaggtagaaaacactacaagtaaccccaagcttgc

SEQ ID NO: 1321 - DNA, 705 bp, Artificial Sequence
  Description of Artificial sequences:primer
  misc_feature (1)..(705): ribosomal protein s8(RPS8) gene.
ctctttccagccagcgccgagcgatgggcatctctcgggacaactggcacaagcgccgcaaaaccgggggcaagagaaagccctaccacaagaagcggaagtatgagttggggcgcccagctgccaacaccaagattggcccccgccgcatccacacagtccgtgtgcggggaggtaacaagaaataccgtgccctgaggttggacgtggggaatttctcctggggctcagagtgttgtactcgtaaaacaaggatcatcgatgttgtctacaatgcatctaataacgagctggttcgtaccaagaccctggtgaagaattgcatcgtgctcatcgacagcacaccgtaccgacagtggtacgagtcccactatgcgctgcccctgggccgcaagaagggagccaagctgactcctgaggaagaagagattttaaacaaaaaacgatctaaaaaaattcagaagaaatatgatgaaaggaaaaagaatgccaaaatcagcagtctcctggaggagcagttccagcagggcaagcttcttgcgtgcatcgcttcaaggccgggacagtgtggccgagcagatggctatgtgctagagggcaaagagttggagttctatcttaggaaaatcaaggcccgcaaaggcaaataaatccttgttttgtcttcacccatgtaataaaggtgtttattgttttgttcccaca

SEQ ID NO: 1322 - DNA, 399 bp, Artificial Sequence
  Description of Artificial sequences:primer
  misc_feature (1)..(399): 3' terminal sequence from clone image:546935.
  misc_feature (250)..(250): n is a, c, g, or t
  misc_feature (350)..(351): n is a, c, g, or t
  misc_feature (356)..(356): n is a, c, g, or t
  misc_feature (377)..(377): n is a, c, g, or t
gttgtttaatggtaaagctcagtagactccagcaccaggactggcatggagtcaaagcagcagggacggctgggtgaccccagggagcctcacatggcgaagaggatgaggaaggcgaccatcaaacagaagagtcccatggcctcagacagggcaaaccccagaatggcactaggagaagagctgctgcttgagagatgggttcctggcatagccaactaatcaagctaccaaacactgtgccaatgcnagctcctgatccagccacaccaactgtggcggccccagcaccaatgaaacttggctgctgtgtcgatgtcccgggaaattgacactggtctggaattccnntcggnccacctggagaggggagctgntgaaggaaaggctgcttagatg

SEQ ID NO: 1323 - DNA, 182 bp, Artificial Sequence
  Description of Artificial sequences:primer
  misc_feature (1)..(182): 5' terminal sequence from clone image:546935.
  misc_feature (26)..(26): n is a, c, g, or t
  misc_feature (33)..(33): n is a, c, g, or t
  misc_feature (41)..(41): n is a, c, g, or t
  misc_feature (55)..(55): n is a, c, g, or t
  misc_feature (62)..(62): n is a, c, g, or t
  misc_feature (84)..(84): n is a, c, g, or t
  misc_feature (89)..(89): n is a, c, g, or t
  misc_feature (93)..(93): n is a, c, g, or t
  misc_feature (99)..(99): n is a, c, g, or t
  misc_feature (113)..(113): n is a, c, g, or t
  misc_feature (146)..(146): n is a, c, g, or t
  misc_feature (163)..(163): n is a, c, g, or t
ctaagcagccttcctgcagcagctgngctctgnaggtggcncgacgggaacttgnagatcantgtgatttctcgggacatcganatagnagcnaagttnattggtgctggggncgcatagttggtgtggctggataaggagctggnattggaaaagtgtttgntagcttgattattggcatg

SEQ ID NO: 1324 - DNA, 450 bp, Artificial Sequence
  Description of Artificial sequences:primer
  misc_feature (1)..(450): 3' terminal sequence from clone image:547224.
  misc_feature (414)..(414): n is a, c, g, or t
  misc_feature (422)..(422): n is a, c, g, or t
  misc_feature (429)..(429): n is a, c, g, or t
  misc_feature (440)..(440): n is a, c, g, or t
tggaatgtaaatctttttattaaaacacttgtctttccacagtagtaaagcgttggcatgtgcttataaaaataatcaccaaccataattatactgaattcctcttatcaactgcatacaaagtgtcttcaatacaattttttccgtataaaaatactgggaaaaattgataaataacaaacaggtaagagaaaggtatttctaggcaatctgaattgttgggacaaagtgagtcctgtgggaggggtgtttgaacacacagccacaggccatgtcctgacagtgctgcaggtcagatggcaaaagaaagcagaggtgtctggggtgactttcctgctccaaggtcttggggtactagcattcagtacatttcctccctagttggctacctgtggtttcccaattgatcccggnccaaaccntaaggancttttgattcncttaaacaac

SEQ ID NO: 1325 - DNA, 429 bp, Artificial Sequence
  Description of Artificial sequences:primer
  misc_feature (1)..(429): 5' terminal sequence from clone image:547224.
  misc_feature (13)..(13): n is a, c, g, or t
  misc_feature (22)..(23): n is a, c, g, or t
  misc_feature (25)..(25): n is a, c, g, or t
  misc_feature (27)..(27): n is a, c, g, or t
  misc_feature (41)..(41): n is a, c, g, or t
  misc_feature (233)..(233): n is a, c, g, or t
  misc_feature (235)..(236): n is a, c, g, or t
tgtttcggaggcnagcggggcnngncntgtgacaactgccngtagacctggggctgctgaacccagtcccgatggcaccaccggccacacctacaaccagtatacacagagatacaatcagagaacaaacactaacgtaaattgccccattgagtgcttcatgccgctagatgtgcaagctgacagagacgattctcgagagtaatctttccagccccacccgtacaagtgtntnnctaccaaggtcaatccacaccccagtgatgttagcagaccctccatctttgagtggtcctttcacccttaagccttttgctctggagccatgttctcagcttcagacaatttacagcttctccaagcatcgcccgtggattgttttgagacttctctcctcaatggtgacagttggtcacctgttctgcttca

SEQ ID NO: 1326 - DNA, 316 bp, Artificial Sequence
  Description of Artificial sequences:primer
  misc_feature (1)..(316): 3' terminal sequence from clone image:547334.
  misc_feature (25)..(25): n is a, c, g, or t
  misc_feature (214)..(214): n is a, c, g, or t
  misc_feature (269)..(269): n is a, c, g, or t
  misc_feature (301)..(301): n is a, c, g, or t
acagtgggctggcctacagcaggcntaccccagcccacttctccctgcttactccaggatgagaggaacagtagaggtgggggtacagctgggaacaggggccagggcagtggtggctctggggtaagatgctgggctgaggctaaggataggtgggagctgcccatgtgcagtcatctttgcccagtgacacttcagagctgtcagggctaangaacctacatagggcatttgtgaggcaggctaagcaggatgctggcagctcaggnctggccttccctttctaactgatgatctgccngggttcgcccatagc

SEQ ID NO: 1327 - DNA, 410 bp, Artificial Sequence
  Description of Artificial sequences:primer
  misc_feature (1)..(410): 5' terminal sequence from clone image:547334.
  misc_feature (193)..(193): n is a, c, g, or t
  misc_feature (197)..(197): n is a, c, g, or t
  misc_feature (203)..(203): n is a, c, g, or t
agctactctccttccagtccacaaacgaccaagccttctctgcctcaacatggccaacaagggtccatcctacggcatgagcgagaagtgcagtccaaaattgagaagaagtatgacgaggagctggaggagcgacgtagtggagtggattgtagtgcagtgtggccctgatgtaggccgcccagatcgtggngccntgggcnttccaggtgtggctgaagaatggtgtgattctgagcaaattggtgaacagcctgtatcctgagggatcgaagccagtgaaggtgcctgagaacccaccctccatggtctttaagcagatggaacaggtggctcaattctttgaaggcagctgaagattatggagtcatcaagactgacatgttccagactgttgacctctatgaagg

SEQ ID NO: 1328 - DNA, 346 bp, Artificial Sequence
  Description of Artificial sequences:primer
  misc_feature (1)..(346): 3' terminal sequence from clone image:547443. wiskott-aldrich syndrome-like(WASL) gene.
  misc_feature (261)..(261): n is a, c, g, or t
tgtcaactgtagccatgggtagattgggaccatttggagcatctcgtcttttttcagatttcctttgtcgtcggcccaacaggtctgtaactgcttttcggaacttttttgcttcttcttcattggcaaaattaagagctacttgacaagtatctccagcaaaggtatgagaatatcctctaggactattatatacaaagttattgtatagctcttgttcccacagtaatttcccatccttaatgtcaaatattcttaaanaataagatctctgaggattgtccttaaccagacaagccgacaccactgcacttcttttgcccacatacagttccgatcttgctgc

SEQ ID NO: 1329 - DNA, 1792 bp, Artificial Sequence
  Description of Artificial sequences:primer
  misc_feature (1)..(1792): wiskott-aldrich syndrome-like(WASL) gene.
ggcagagggacaacgaccatccggccctagcctggccgggcgggtgccgggagcttccctttctcagcgcggcggaaggtggctcgccgtcagcgcctgcttccctcgacctcgtcctcctccccgctccggacgagccgagatgtggcgcctctgactccacttctccccgcccctgtcaccgagagggggaacgagctctcgcccactcgccggagagacggccctggactcccaaccccgccggcgaaaccatgagctccgtccagcagcagccgccgccgccgcggagggtcaccaacgtggggtccctgttgctcaccccgcaggagaacgagtccctcttcactttcctcggcaagaaatgtgtgactatgtcttcagcagtggtgcagttatatgcagcagatcggaactgtatgtggtcaaagaagtgcagtggtgttgcttgtcttgttaaggacaatccacagagatctcattttttaagaatatttgacattaaggatgggaaactattgtgggaacaagagctatacaataactttgtatataatagtcctagaggatattttcatacctttgctggagatacttgtcaagttgctcttaattttgccaatgaagaagaagcaaaaaaatttcgaaaagcagttacagaccttttgggccgtcgacaaaggaaatctgagaaaagacgagatcccccaaatggtcctaatctacccatggctacagttgatataaaaaatccagaaatcacaacaaatagattttatggtccacaagtcaacaacatctcccataccaaagaaaagaagaagggaaaagctaaaaagaagagattaaccaagggagatataggaacaccaagcaatttccagcacattggacatgttggttgggatccaaatacaggctctgatctgaataatttggatccagaattgaagaatctttttgatatgtgtggaatcttagaggcacaacttaaagaaagagaaacattaaaagttatatatgactttattgaaaaaacaggaggtgttgaagctgttaaaaatgaactgcggaggcaagcaccaccacctccaccaccatcaaggggagggccacctcctcctcctccccctccacatagctcgggtcctcctcctcctcctgctaggggaagaggcgctcctcccccaccaccttcaagagctcccacagctgcacctccaccaccgcctccttccaggccaagtgtagaagtccctccaccaccgccaaataggatgtaccctcctccacctccagcccttccctcctcagcaccttcagggcctccaccaccacctccatctgtgttgggggtagggccagtggcaccacccccaccgcctccacctccacctcctcctgggccaccgcccccgcctggcctgccttctgatggggaccatcaggttccaactactgcaggaaacaaagcagctcttttagatcaaattagagagggtgctcagctaaaaaaagtggagcagaacagtcggccagtgtcctgctctggacgagatgcactgttagaccagatacgacagggtatccaactaaaatctgtggctgatggccaagagtctacaccaccaacacctgcacccacttcaggaattgtgggtgcattaatggaagtgatgcagaaaaggagcaaagccattcattcttcagatgaagatgaagatgaagatgatgaagaagattttgaggatgatgatgagtgggaagactgatctatatattatatatatac

SEQ ID NO: 1330 - DNA, 431 bp, Artificial Sequence
  Description of Artificial sequences:primer
  misc_feature (1)..(431): 3' terminal sequence from clone image:548702. ribosomal protein l10a(RPL10A) gene.
  misc_feature (431)..(431): n is a, c, g, or t
gagtggcagcagtgaggtttattggagcatcctaatacagacgctggggcttgcattggtgctcttgatgtacagagcccgcacgttttgccagtttttcttaagcaaggacaccaagaaattgacagccagatgaatgttgtagactagctcatcatcggtcatcttcacgtggccaacagcgacggccaaacacagcaccttcttcatctggaacttgattgtcgatttcacctcatccactttggccaccatgttttcattgtgtgtcagcagggaggggaacttgccagccttgtttaggcctgggcccaggatacgtgggatctgcttaatcagagactcagaggccaaaaaggcatcgtacttcttagccagcttcttgaccaacttcttgtttttgttaagcttcttgagcgcctcgatgtccn

SEQ ID NO: 1331 - DNA, 384 bp, Artificial Sequence
  Description of Artificial sequences:primer
  misc_feature (1)..(384): 5' terminal sequence from clone image:548702. ribosomal protein l10a(RPL10A) gene.
  misc_feature (66)..(67): n is a, c, g, or t
caaagtctcacgcgacaccctgtacgaggcggtgcgggaagtcctgcacgggaaccagcgcaagcnngcaagtttctggagacggtggagctgcagatcagcctgaagaactacgaccctcagaaggacaaacgtttctcgggcaccgtcagctcaagtccaccccacgccccaagttctcggtgtgcgttctgggggaccagcagcactgtgatgaagccaaggccgtggatatcccccacatggacatcgaggcgctcaagaagcttaacaaaaacaagaagttggtcaagaagctggctaagaagtaccgatgcctttttggcctctgagtctctgattaagcagatcccacgtatcctggggcccaggcctaaacaaggc

SEQ ID NO: 1332 - DNA, 700 bp, Artificial Sequence
  Description of Artificial sequences:primer
  misc_feature (1)..(700): ribosomal protein l10a(RPL10A) gene.
gcggcgtgagaagccatgagcagcaaagtctctcgcgacaccctgtacgaggcggtgcgggaagtcctgcacgggaaccagcgcaagcgccgcaagttcctggagacggtggagttgcagatcagcttgaagaactatgatccccagaaggacaagcgcttctcgggcaccgtcaggcttaagtccactccccgccctaagttctctgtgtgtgtcctgggggaccagcagcactgtgacgaggctaaggccgtggatatcccccacatggacatcgaggcgctgaaaaaactcaacaagaataaaaaactggtcaagaagctggccaagaagtatgatgcgtttttggcctcagagtctctgatcaagcagattccacgaatcctcggcccaggtttaaataaggcaggaaagttcccttccctgctcacacacaacgaaaacatggtggccaaagtggatgaggtgaagtccacaatcaagttccaaatgaagaaggtgttatgtctggctgtagctgttggtcacgtgaagatgacagacgatgagcttgtgtataacattcacctggctgtcaacttcttggtgtcattgctcaagaaaaactggcagaatgtccgggccttatatatcaagagcaccatgggcaagccccagcgcctatattaaggcacatttgaataaattctattaccagttc

SEQ ID NO: 1333 - DNA, 258 bp, Artificial Sequence
  Description of Artificial sequences:primer
  misc_feature (1)..(258): 3' terminal sequence from clone image:548777. block of proliferation 1(BOP1) gene.
gcacagggtaaaggctctgttgacttcagcacgaccaccccagccccaggcaggcagaacagctaggtgaagaggcggacagtcccgtctgcccccgaggagaagacccacggctgggtggggtggaagatgacgtccagcactcccagatctcgggtcagcacgtgtcccttcagcaccttgacgggcaccagcaaggggttctgcagaaggtcattgtacaccatgccatggcagacgatgacactgccgtcgtcc

SEQ ID NO: 1334 - DNA, 284 bp, Artificial Sequence
  Description of Artificial sequences:primer
  misc_feature (1)..(284): 5' terminal sequence from clone image:548777. block of proliferation 1(BOP1) gene.
  misc_feature (225)..(225): n is a, c, g, or t
  misc_feature (239)..(240): n is a, c, g, or t
cactctttgcgtcaggctcggacgacggcagtgtcatcgtctgccatggcatggtgtacaatgaccttctgcagaaccccttgctggtgcccgtcaaggtgctgaagggacacgtgctgacccgagatctgggagtgctggacgtcatcttccaccccacccagcccgtgggtcattctcctcgggggcagacgggacatgtccgcctcttcacctagctgttcntgcctgccatgggnntggggtggtcgtgctgaagtcaacagagcctttaccctgtgcta

SEQ ID NO: 1335 - DNA, 2396 bp, Artificial Sequence
  Description of Artificial sequences:primer
  misc_feature (1)..(2396): block of proliferation 1(BOP1) gene.
ggcacgagggctgtgcgggtggcggccggcgcgcggtggggcatggcgggttcgcggggtgcggggcgcacggcggcgccgagcgtgcggccggagaagcggcggtctgagcccgaactggagcctgagcccgagccggagccccccctcctctgcacctctcctctcagccacagcaccggcagcgattctggcgtctccgacagcgaggagagtgtgttctcaggcctggaagattccggcagtgacagcagtgaggatgatgacgaaggcgacgaggagggagaggacggagcccttgatgacgagggccacagtgggattaaaaagaccactgaggagcaggtgcaggccagcactccttgcccgaggacagagatggcgagcgcccggattggggatgagtatgcggaggacagctctgatgaggaggacatccggaacacggtgggcaacgtgcccttggagtggtacgatgacttcccccacgtgggctacgacctggatggcaggcgcatctacaagcccctgcggacccgggatgagctggaccagttcctggacaagatggacgatcctgactactggcgcaccgtgcaggacccgatgacagggcgggacctgagactgacggatgagcaggtggccctggtgcggcggctgcagagtggccagtttggggatgtgggcttcaacccctatgagccggctgtcgacttcttcagcggggacgtcatgatccacccggtgaccaaccgcccggccgacaagcgcagcttcatcccctccctggtggagaaggagaaggtctctcgcatggtgcacgccatcaagatgggctggatccagcctcgccggccccgagaccccacccccagcttctatgacctgtgggcccaggaggaccccaacgccgtgctcgggcgccacaagatgcacgtacctgctcccaagctggccctgccaggccacgccgagtcgtacaacccaccccctgaatacctgctcagcgaggaggagcgcttggcgtgggaacagcaggagccaggcgagaggaagctgagctttttgccacgcaagttcccgagcctgcgggccgtgcctgcctacggacgcttcatccaggaacgcttcgagcgctgccttgacctgtacctgtgcccacggcagcgcaagatgagggtgaatgtagaccctgaggacctcatccccaagctgcctcggccgagggacctgcagcccttccccacgtgccaggccctggtctacaggggccacagtgaccttgtccggtgcctcagtgtctctcctgggggccagtggctggtttcaggctctgacgacggctccctgcggctctgggaggtggccactgcccgctgtgtgaggactgttcccgtggggggcgtggtgaagagtgtggcctggaaccccagccccgctgtctgcctggtggctgcagccgtggaggactcggtgctgctgctgaacccagctctgggggaccggctggtggcgggcagcacagatcagctgttgagcgccttcgtcccgcctgaggagccccccttgcagccggcccgctggctggaggcctcagaggaggagcgccaagtgggcctgcggctgcgcatctgccacgggaagccagtgacgcaggtgacctggcacgggcgtggggactacctggccgtggtgctggccacccaaggccacacccaggtgctgattcaccagctgagccgtcgccgcagccagagtccgttccgccgcagccacggacaggtgcagcgagtggccttccaccctgcccggcccttcctgttggtggcgtcccagcgcagcgtccgcctctaccacctgctgcgccaggagctcaccaagaagctgatgcccaactgcaagtgggtgtccagcctggcggtgcaccctgcaggtgacaacgtcatctgtgggagctacgatagcaagctggtgtggtttgacctggatctttccaccaagccatacaggatgctgagacaccacaagaaggctctgcgggctgtggccttccacccgcggtacccactctttgcgtcaggctcggacgacggcagtgtcatcgtctgccatggcatggtgtacaatgaccttctgcagaaccccttgctggtgcccgtcaaggtgctgaagggacacgtgctgacccgagatctgggagtgctggacgtcatcttccaccccacccagccgtgggtcttctcctcgggggcagacgggactgtccgcctcttcacctagctgttctgcctgcctggggctggggtggtcgtgctgaagtcaacagagcctttaccctgtgcaaaaaaaaaaaaaaaaaaaaaaaaaaaaaaaaaaaaaaaaaaaaaaaaaaa

SEQ ID NO: 1336 - DNA, 509 bp, Artificial Sequence
  Description of Artificial sequences:primer
  misc_feature (1)..(509): 3' terminal sequence from clone image:549065. thyroid autoantigen 70kda (ku antigen)(G22P1) gene.
  misc_feature (87)..(87): n is a, c, g, or t
  misc_feature (239)..(239): n is a, c, g, or t
  misc_feature (294)..(294): n is a, c, g, or t
  misc_feature (308)..(308): n is a, c, g, or t
  misc_feature (315)..(315): n is a, c, g, or t
  misc_feature (320)..(320): n is a, c, g, or t
  misc_feature (342)..(342): n is a, c, g, or t
  misc_feature (373)..(373): n is a, c, g, or t
  misc_feature (455)..(455): n is a, c, g, or t
  misc_feature (463)..(463): n is a, c, g, or t
  misc_feature (504)..(504): n is a, c, g, or t
tttttttttttttttttttttttttttttttttttagtacaaacttagggctctttattcaggcagtaaagtaaggaacagcaaagngggagggctacaccatcaccatggcaacagaaagcctcaaaaacataaagtccctcgacttatgtcgggtagactcttcctagctcaggagaaacacattttaactggctgaggacaaggccaggcagcctggcaacactgcggaagggcanctggacgcgcggcctctggtcagtcctggaagtgcttggtgagggcttccagcangctcctgcttcttnagcccantcttnagcccgtaagcccggcagcctntttcagcatgggcacagtgaacttgcccagngtacccttgctgatgtgggtcttcagctcctcttctgaatactccaccttgggccttttgcttccagaaccttcattaacgngttttccncttgggaactttcccttcaggaattgtaatctgggggggtnaaaaa

SEQ ID NO: 1337 - DNA, 353 bp, Artificial Sequence
  Description of Artificial sequences:primer
  misc_feature (1)..(353): 5' terminal sequence from clone image:549065. thyroid autoantigen 70kda (ku antigen)(G22P1) gene.
  misc_feature (115)..(115): n is a, c, g, or t
  misc_feature (154)..(154): n is a, c, g, or t
  misc_feature (174)..(174): n is a, c, g, or t
  misc_feature (241)..(241): n is a, c, g, or t
  misc_feature (274)..(274): n is a, c, g, or t
  misc_feature (318)..(318): n is a, c, g, or t
  misc_feature (320)..(320): n is a, c, g, or t
  misc_feature (345)..(345): n is a, c, g, or t
  misc_feature (349)..(349): n is a, c, g, or t
ttctagagcttgaccagtttaaggggcagcagggacaaaaacgtttccaagacatgatgggccacggatctgactactcactcagtgaagtgctgtgggtctgtgccaaccatcntttagtgatgtccaattcaagatgagtcataagaagggntcatgctgttcaccaatgangacaacccccatggcaatgacagtgccaaagccagccgggccaggaccaaagccggtgatcttccgngatacaggcatcttccttgacttgatgcacctncagaaacctggggggctttgacatatccttgttctacagagatntnatcagcatagcaggaggatgatganctcnaggg

SEQ ID NO: 1338 - DNA, 2743 bp, Artificial Sequence
  Description of Artificial sequences:primer
  misc_feature (1)..(2743): thyroid autoantigen 70kda (ku antigen)(G22P1) gene.
gcgggccgttatccatttgtgttgttcgccagctaggcctggcctcgtcccgcttcgctcggtcggtctcgcgcgcccccatagccttgctagagggttagcgttagccttaagtgtgcgaatccgaggagcagcgacagactcgagaccacgctccttcctcgggaaggaggcggcacctcgcgtttgaggcccgcctgcgtttgaggcccgcctgcgcttgcggcccgcctgcgcttgaggcctgtctgcgtttgagatctcattgggcgtgattgaggaatttggggaggtttttgggcggtattgaggacgagggggtccgttagtcagcatagaatcctggagcgggaatccctcaccgtctaaatggcgtcgggggcgggacctccgggatctggcttccgcgggccgccgccggccctgaaacgtgagggatagctgagatgaggcagctactgggatggcccccatgcgcatttacatgcagtccgactgccgagctttcgaggcagcaggatttaccgtccacattcctcactactaaccaagcttttagaacagatctcacaagaacctagaggtcggtattttttcgatttaaatttgcctgttactgacgttaacgtctttcgcctagtgagcagtagccaacatgtcagggtgggagtcatattacaaaaccgagggcgatgaagaagcagaggaagaacaagaagagaaccttgaagcaagtggagactataaatattcaggaagagatagtttgatttttttggttgatgcctccaaggctatgtttgaatctcagagtgaagatgagttgacaccttttgacatgagcatccagtgtatccaaagtgtgtacatcagtaagatcataagcagtgatcgagatctcttggctgtggtgttctatggtaccgagaaagacaaaaattcagtgaattttaaaaatatttacgtcttacaggagctggataatccaggtgcaaaacgaattctagagcttgaccagtttaaggggcagcagggacaaaaacgtttccaagacatgatgggccacggatctgactactcactcagtgaagtgctgtgggtctgtgccaacctctttagtgatgtccaattcaagatgagtcataagaggatcatgctgttcaccaatgaagacaacccccatggcaatgacagtgccaaagccagccgggccaggaccaaagccggtgatctccgagatacaggcatcttccttgacttgatgcacctgaagaaacctgggggctttgacatatccttgttctacagagatatcatcagcatagcagaggatgaggacctcagggttcactttgaggaatccagcaagctagaagacctgttgcggaaggttcgcgccaaggagaccaggaagcgagcactcagcaggttaaagctgaagctcaacaaagatatagtgatctctgtgggcatttataatctggtccagaaggctctcaagcctcctccaataaagctctatcgggaaacaaatgaaccagtgaaaaccaagacccggacctttaatacaagtacaggcggtttgcttctgcctagcgataccaagaggtctcagatctatgggagtcgtcagattatactggagaaagaggaaacagaagagctaaaacggtttgatgatccaggtttgatgctcatgggtttcaagccgttggtactgctgaagaaacaccattacctgaggccctccctgttcgtgtacccagaggagtcgctggtgattgggagctcaaccctgttcagtgctctgctcatcaagtgtctggagaaggaggttgcagcattgtgcagatacacaccccgcaggaacatccctccttattttgtggctttggtgccacaggaagaagagttggatgaccagaaaattcaggtgactcctccaggcttccagctggtctttttaccctttgctgatgataaaaggaagatgccctttactgaaaaaatcatggcaactccagagcaggtgggcaagatgaaggctatcgttgagaagcttcgcttcacatacagaagtgacagctttgagaaccccgtgctgcagcagcacttcaggaacctggaggccttggccttggatttgatggagccggaacaagcagtggacctgacattgcccaaggttgaagcaatgaataaaagactgggctccttggtggatgagtttaaggagcttgtttacccaccagattacaatcctgaagggaaagttaccaagagaaaacacgataatgaaggttctggaagcaaaaggcccaaggtggagtattcagaagaggagctgaagacccacatcagcaagggtacgctgggcaagttcactgtgcccatgctgaaagaggcctgccgggcttacgggctgaagagtggtctgaagaagcaggagctgctggaagccctcaccaagcacttccaggactgaccagaggccgcgcgtccagctgcccttccgcagtgtggccaggctgcctggccttgtcctcagccagttaaaatgtgtttctcctgagctaggaagagtctacccgacataagtcgagggactttatgtttttgaggctttctgttgccatggtgatggtgtagccctcccactttgctgttctttactttactgcctgaataaagagccctaagtttgtactaaaaaaaaaaaaaaaaaaaaaaaaaaaaaaaaaaa

SEQ ID NO: 1339 - DNA, 581 bp, Artificial Sequence
  Description of Artificial sequences:primer
  misc_feature (1)..(581): 3' terminal sequence from clone image:549139. arylsulfatase d(ARSD) gene.
  misc_feature (477)..(477): n is a, c, g, or t
  misc_feature (483)..(483): n is a, c, g, or t
  misc_feature (512)..(512): n is a, c, g, or t
  misc_feature (546)..(546): n is a, c, g, or t
ttcagattctgcaagaattttaatgtctatgctcttttaagaatctgcagcctcactggtcctctccagggtttcttgaaggccatagaaggaagacagcgtgtctgcattgtcctgaacattaactttatcgcttcactttcggtaacttctgatgatgacatgaagtcactggctatgagccagtcccatctcctccacattatcaccatataagccatgctgacttttccccaggaatgcactcgtggtcacaaggggaatgtgcacatgcagcaaagaaaggaagaggagaaatggcccatgcttgtgtctttcaatataggaacagcttcctttagcataagactccgctgttttctccagaaccatgggttgctccgtgacgtcatggtttctcatcaggatacagttccagcgtcgcacaaacccgaagagggagtaccaagaggatgaaaacaggcagcccacgccggncatggntggaactgctctcgcggagacagagaagnaaccgcagtctgggccggcagccagggtgagatncccagcgccaggactgggtgtaacccagagctgcg

SEQ ID NO: 1340 - DNA, 553 bp, Artificial Sequence
  Description of Artificial sequences:primer
  misc_feature (1)..(553): 5' terminal sequence from clone image:549139. arylsulfatase d(ARSD) gene.
  misc_feature (90)..(90): n is a, c, g, or t
  misc_feature (95)..(95): n is a, c, g, or t
  misc_feature (180)..(180): n is a, c, g, or t
  misc_feature (198)..(198): n is a, c, g, or t
  misc_feature (201)..(201): n is a, c, g, or t
  misc_feature (386)..(386): n is a, c, g, or t
  misc_feature (497)..(497): n is a, c, g, or t
  misc_feature (550)..(550): n is a, c, g, or t
ggatttgactatttctacggcatgcccttcacgctcacaaacgactgtgacccaggcaggccccccgaagtggacgccgccctgaggcangctcntggggttacacccagttcctggcgctggggattctcaccctggctgccggccagacctgcggtttcttctctgtctccgcgaganagtcaccggcatggcgcngtngggctgcctgtttttcatctcttggtactcctccttcgggtttgtgcgacgctggaactgtatcctgatgagaaaccatgacgtcacggagcaacccatggttctggagaaaacagcgagtcttatgctaaaggaagctgtttcctatattgaaagacacaagcatgggccatttctcctcttcntttctttgctgcatgtgcacattccccttgtgaccacgagtgcattcctggggaaaagtcagcatggcttatatggtgataatgtggaggagatggactggctcatagccnttgacttcatgtcatcatcagaagttaccgaaagtgaaggataaagttaatgntcg

SEQ ID NO: 1341 - DNA, 2167 bp, Artificial Sequence
  Description of Artificial sequences:primer
  misc_feature (1)..(2167): arylsulfatase d(ARSD) gene.
atgcgatccgccgcgcggaggggacgcgccgcgcccgccgccagggactctttgccggtgctactgtttttatgcttgcttctgaagacgtgtgaacctaaaactgcaaatgcctttaaaccaaatatcctactgatcatggcggatgatctaggcactggggatctcggttgctatgggaacaatacactgagaacgccgaatattgaccagcttgcagaggaaggtgtgaggctcactcagcacctggcggccgccccgctctgcaccccaagccgagctgcattcctcacagggagacattccttcagatcaggcatggacgccagcaatggataccgggcccttcagtggaacgcaggctcaggtggactccctgagaacgaaaccacttttgcaagaatcttgcagcagcatggctatgcaaccggcctcataggaaaatggcaccagggtgtgaattgtgcatcccgcggggatcactgccaccaccccctgaaccacggatttgactatttctacggcatgcccttcacgctcacaaacgactgtgacccaggcaggccccccgaagtggacgccgccctgagggcgcagctctggggttacacccagttcctggcgctggggattctcaccctggctgccggccagacctgcggtttcttctgtgtctccgcgagagcagtcaccggcatggccggcgtgggctgcctgtttttcatctcttggtactcctccttcgggtttgtgcgacgctggaactgtatcctgatgagaaaccatgacgtcacggagcaacccatggttctggagaaaacagcgagtcttatgctaaaggaagctgtttcctatattgaaagacacaagcatgggccatttctcctcttcctttctttgctgcatgtgcacattccccttgtgaccacgagtgcattcctggggaaaagtcagcatggcttatatggtgataatgtggaggagatggactggctcatagccagtgacttcatgtcatcatcagaagttaccgaaagtgaagcgataaagttaatgttcaggacaatgcagagacgctgtcttccttctatggccttcaagaaaccctggagaggaccagtgaggctgcagattcttaaaagagcatagacattaaaattcttgcagaatctgaatgtgtctcctgagacaagcatcgtgatagagttcacagtcttaaaagtctgcattttcaggtggggcaaggtggctcatgcctttaatcccagcattttgggaggctaaggcagggagatggcttgagaccaggagttcaagaccagcctgggcaacatagtgagacgcccccccccccatctctacaaaaaatttaaaaaattagccatggtggtgtgcacctgtggtcccagctactccagaggctgaggtgggaagatcatttgagcccaggaggctgaggctgcaatgactgataattattgcaccactgaactccagcctgggccacatagcaagaccctgtctccaaaaaaaaaaaaaaaaaaaaaaaggaataaaggacgcagaatagggagaaaaacttctctcatatcatttatttggtccttcagtatttctgaatacttagtctaatttggcacaaaatcaactgtattagtccattcttgcaaagaaatacctgagactgggtattttataaggaaaagaggttggattggctcacgttctgcagctgcacagaagcatggcagcatctgcttctgggagacctcggggagtttttgctcatggtggaaggcgaagggggagcaggcgtcttgcggcaggagaaggaccaagagaggagaggaagagccgcacacttttaaacaaccagatctcgtgagaagctactccctccgcagcaccaagcgggggatggtgctcaaccattcatgagaactctgtccccatcattcagtcacctccccccaggccccaccgccgattctgaggatgacaattccacatgagatttgggcggggacacacatccaaactatattgtcaaccttctacacagccaatgacttaacagcctcattagaagttacagaaactaaagcaataaagttcggacaatgcagagaggtcaccttccttctatggccttgaagaaaccctggag

SEQ ID NO: 1342 - DNA, 604 bp, Artificial Sequence
  Description of Artificial sequences:primer
  misc_feature (1)..(604): 3' terminal sequence from clone image:549152. ribosomal protein s8(RPS8) gene.
  misc_feature (258)..(258): n is a, c, g, or t
  misc_feature (531)..(531): n is a, c, g, or t
  misc_feature (548)..(548): n is a, c, g, or t
  misc_feature (577)..(577): n is a, c, g, or t
  misc_feature (590)..(590): n is a, c, g, or t
ttttttttttttttttttttttttttttgaagacaaaacaaggatttatttgcctttgcgggccttgattttcctaagatagaactccaactctttgccctctagcacatagccatctgctcggccacactgtcccggccttgaagcgatgcacgcaagaagcttgccctgctggaactgctcctccaggagactgctgattttggcattctttttcctttcatcatatttcttctgaatttttttagatcgtttttngtttaaaatctcttcttcctcaggagtcagcttggctcccttcttgcggcccaggggaagcgcatagtgggactcgtaccactgtcggtacggtgtgctgtcgatgagcacgatgcaattcttcaccagggtcttggtacgaaccagctcgttattagatgcattgtagacaacatcgatgatccttgttttacgagtacaacactctgagccccaggagaaattccccacgtccaacctcagggcacggtaattcttgttacctccccgcanacggactgtgtggattncgccggggccaaatcttggtgttggcagntgggggccccaantcataattccggtt

SEQ ID NO: 1343 - DNA, 504 bp, Artificial Sequence
  Description of Artificial sequences:primer
  misc_feature (1)..(504): 5' terminal sequence from clone image:549152. ribosomal protein s8(RPS8) gene.
  misc_feature (416)..(416): n is a, c, g, or t
  misc_feature (431)..(431): n is a, c, g, or t
  misc_feature (433)..(433): n is a, c, g, or t
ctcgggacaactggcacaagcgccgcaaaaccgggggcaagagaaagccctaccacaagaagcggaagtatgagttggggcgcccagctgccaacaccaagattggcccccgccgcatccacacagtccgtgtgcggggaggtaacaagaaataccgtgccctgaggttggacgtggggaatttctcctggggctcagagtgttgtactcgtaaaacaaggatcatcgatgttgtctacaatgcatctaataacgagctggttcgtaccaagaccctggtgaagaattgcatcgtgctcatcgacagcacaccgttaccgacagtggtacgagtcccactatgcgctgcccctgggccgcaaagaagggagccaagctgactcctgaggaagaagagattttaaacaaaaaacgantctaaaaaaatttcngnagaaatatgattgaaaaggaaaaagaattgccaaatcagcagtcttcctgggaggagcagttccagcaggg

SEQ ID NO: 1344 - DNA, 602 bp, Artificial Sequence
  Description of Artificial sequences:primer
  misc_feature (1)..(602): 3' terminal sequence from clone image:549173. eukaryotic translation initiation factor 3, subunit 2 beta, 36kda(EIF3S2) gene.
  misc_feature (460)..(460): n is a, c, g, or t
  misc_feature (547)..(547): n is a, c, g, or t
  misc_feature (554)..(554): n is a, c, g, or t
ttttttctgaccagaagccatttattaccaaaccaatttatttcttagagttcaaaaccttctgtgagaatcttctctggcctggttggagatccaccttctttttttttttttgagacggagttttgctcttgtggctcaggatggagtgcaatgacgtgatctcagctcactgcaacctctgcctcctgggttcaagtgattctcctgcctcagcctcctgagtagctgggactataggcgtgtgccaccatgcctggctaatttttgtatttttagtagagacgaggtttctccatgttggtcaggctggtcttaaactcctgacctcaggtgatccgcctgccttaaaaaaaaagtggtgggattacaggcatgagccaccacgcccggcaggagatccagcttcttaagcctcaaactcaaattcgaagtactgtgggtcgaagtaatggatacngacgtaaccatcttcgccgccgctgctgtagctcttgccatcaggatggaaggcaacactgttgataggtccaagtgaccctgaatnttcaaantccttcttcaaaggccaatggaagaactggcctcaaattgcaatcctt

SEQ ID NO: 1345 - DNA, 496 bp, Artificial Sequence
  Description of Artificial sequences:primer
  misc_feature (1)..(496): 5' terminal sequence from clone image:549173. eukaryotic translation initiation factor 3, subunit 2 beta, 36kda(EIF3S2) gene.
  misc_feature (400)..(400): n is a, c, g, or t
  misc_feature (489)..(489): n is a, c, g, or t
ttcctcgcgtcacagccgggatgaagccgatcctactgcagggccatgagcggtccattacgcagattaagtataaccgcgaaggagacctcctctttactgtggccaaggaccctatcgtcaatgtatggtactctgtgaatggtgagaggctgggcacctacatgggccataccggagctgtgtggtgtgtggacgctgactgggacaccaagcatgtcctcactggctcagctgacaacagctgtcgtctctgggactgtgaaacaggaaagcagctggcccttctcaagaccaattcggctgtccggacctgcggttttgactttgggggcaacatcatcatgttctccacggacaagcagatgggctaccagtgctttgtgagcttttttgactngcgggattcgagccagaattgacaacaatgagccctacatgaagattcccttgcaatgactctaaaaatcaccagtgctgtttgggganccctggg

SEQ ID NO: 1346 - DNA, 1402 bp, Artificial Sequence
  Description of Artificial sequences:primer
  misc_feature (1)..(1402): eukaryotic translation initiation factor 3, subunit 2 beta, 36kda(EIF3S2) gene.
ctcgcgtcacagccgggatgaagccgatcctactgcagggccatgagcggtccattacgcagattaagtataaccgcgaaggagacctcctctttactgtggccaaggaccctatcgtcaatgtatggtactctgtgaatggtgagaggctgggcacctacatgggccataccggagctgtgtggtgtgtggacgctgactgggacaccaagcatgtcctcactggctcagctgacaacagctgtcgtctctgggactgtgaaacaggaaagcagctggcccttctcaagaccaattcggctgtccggacctgcggttttgactttgggggcaacatcatcatgttctccacggacaagcagatgggctaccagtgctttgtgagcttttttgacctgcgggatccgagccagattgacaacaatgagccctacatgaagatcccttgcaatgactctaaaatcaccagtgctgtttggggacccctgggggagtgcatcatcgctggccatgagagtggagagctcaaccagtatagtgccaagtctggagaggtgttggtgaatgttaaggagcactcccggcagatcaacgacatccagttatccagggacatgaccatgtttgtgaccgcgtccaaggacaacacagccaagctttttgactccacaactcttgaacatcagaagactttccggacagaacgtcctgtcaactcagctgccctctcccccaactatgaccatgtggtcctgggcggtggtcaggaagccatggatgtaaccacaacctccaccaggattggcaagtttgaggccaggttcttccatttggcctttgaagaagagtttggaagagtcaagggtcactttggacctatcaacagtgttgccttccatcctgatggcaagagctacagcagcggcggcgaagatggttacgtccgtatccattacttcgacccacagtactttgaatttgagtttgaggcttaagaagctggatctcctgccgggcgtggttggctcatgcctgtaatcccaccactttttttttaaggcaggcggatcacctgaggtcaggagtttaagaccagcctgaccaacatggagaaacctcgtctctactaaaaatacaaaaattagccaggcatggtggcacacgcctatagtcccagctactcaggaggctgaggcaggagaatcacttgaacccaggaggcagaggttgcagtgagctgagatcacgtcattgcactccatcctgagccacaagagcaaaactccgtctcaaaaaaaaaaaagaagaaggtggatctccaaccaggccagagaagattctcacagaaggttttgaactctaagaaataaattggtttggtaataaatggcttctggtcaga

SEQ ID NO: 1347 - DNA, 577 bp, Artificial Sequence
  Description of Artificial sequences:primer
  misc_feature (1)..(577): 3' terminal sequence from clone image:549178. tyrosine 3-monooxygenase/tryptophan 5-monooxygenase activation protein, theta polypeptide(YWHAQ) gene.
  misc_feature (388)..(388): n is a, c, g, or t
  misc_feature (480)..(480): n is a, c, g, or t
  misc_feature (555)..(555): n is a, c, g, or t
  misc_feature (573)..(573): n is a, c, g, or t
tggtttataaaatgtacttttattttatgttactctgctgttacatagggcataacattttcacaaggcttttttgggactacagtcaatgattagcaacacacaatagtggtccaactctctaaataacaatcactagacaaactggacaccctctcacatgtgcacaaatctgcatggaaaagtactaaagttttagacttggacttgtgtactttaatttatttcccctttctagtgtattaagaaatgacatgcactttaatttgccaaaagcaatgcttgtattctggcagcaacatgctacttctatcacatagtaaaagtgaatacccagaactacaaagggcaggaggtgtaagtgaattttttaattggggagggggangttggcaacttaaacagcagcaaataaaagagtgaataaggaaactccctggttggccacagatacacaagacctccgtatgtgatacaggngccatttcaattggtgacccctagacagagatggcaagtgcttttccattccaatctaatacctcccggattccnactaaaaaggggattccnttaa

SEQ ID NO: 1348 - DNA, 2166 bp, Artificial Sequence
  Description of Artificial sequences:primer
  misc_feature (1)..(2166): tyrosine 3-monooxygenase/tryptophan 5-monooxygenase activation protein, theta polypeptide(YWHAQ) gene.
gtggtgggactcgcgtcgcggccgcggagacgtgaagctctcgaggctcctcccgctgcgggtcggcgctcgccctcgctctcctcgccctccgccccggccccggccccgcgcccgccatggagaagactgagctgatccagaaggccaagctggccgagcaggccgagcgctacgacgacatggccacctgcatgaaggcagtgaccgagcagggcgccgagctgtccaacgaggagcgcaacctgctctccgtggcctacaagaacgtggtcgggggccgcaggtccgcctggagggtcatctctagcatcgagcagaagaccgacacctccgacaagaagttgcagctgattaaggactatcgggagaaagtggagtccgagctgagatccatctgcaccacggtgctggaattgttggataaatatttaatagccaatgcaactaatccagagagtaaggtcttctatctgaaaatgaagggtgattacttccggtaccttgctgaagttgcgtgtggtgatgatcgaaaacaaacgatagataattcccaaggagcttaccaagaggcatttgatataagcaagaaagagatgcaacccacacacccaatccgcctggggcttgctcttaacttttctgtattttactatgagattcttaataacccagagcttgcctgcacgctggctaaaacggcttttgatgaggccattgctgaacttgatacactgaatgaagactcatacaaagacagcaccctcatcatgcagttgcttagagacaacctaacactttggacatcagacagtgcaggagaagaatgtgatgcggcagaaggggctgaaaactaaatccatacagggtgtcatccttctttccttcaagaaacctttttacacatctccattccttattccacttggatttcctatagcaaagaaacccattcatgtgtatggaatcaactgtttatagtcttttcacactgcagctttgggaaaacttcattccttgatttgtgtttgtcttggccttcctggtgtgcagtactgctgtagaaaagtattaatagcttcatttcatataaacataagtaactcccaaacacttatgtagaggactaaaaatgtatctggtatttaagtaatctgaaccagttctgcaagtgactgtgttttgtattactgtgaaaataagaaaatgtagttaattacaatttaaagagtattccacataacttcttaatttctacattccctcccttactcttcgggggtttcctttcagtaagcaacttttccatgctcttaatgtattcctttttagtaggaatccggaagtattagattgaatggaaaagcacttgccatctctgtctaggggtcacaaattgaaatggctcctgtatcacatacggaggtcttgtgtatctgtggcaacagggagtttccttattcactctttatttgctgctgtttaagttgccaacctcccctcccaataaaaattcacttacacctcctgcctttgtagttctggtattcactttactatgtgatagaagtagcatgttgctgccagaatacaagcattgcttttggcaaattaaagtgcatgtcatttcttaatacactagaaaggggaaataaattaaagtacacaagtccaagtctaaaactttagtacttttccatgcagatttgtgcacatgtgagagggtgtccagtttgtctagtgattgttatttagagagttggaccactattgtgtgttgctaatcattgactgtagtcccaaaaaagccttgtgaaaatgttatgccctatgtaacagcagagtaacataaaataaaagtacattttataaaccatttactatggctttgtaacaattgcatacccatattttaagggacaggtgaatttactactttctaaagtttattgatacttcccttttatgtaaaatgtagtagtgatacctatatttccacattgtgcattgtgacacacttgtctagggatgcctggaagtgtataaaattggactgcatttcttagagtgttttactatagatcagtctcatgggccatctcttcctcagatgtaaatgatatctggttaagtgttatatggaataaagtggacattttaaaacta

SEQ ID NO: 1349 - DNA, 544 bp, Artificial Sequence
  Description of Artificial sequences:primer
  misc_feature (1)..(544): 3' terminal sequence from clone image:549200. ribosomal protein l5(RPL5) gene.
  misc_feature (230)..(230): n is a, c, g, or t
  misc_feature (511)..(511): n is a, c, g, or t
  misc_feature (515)..(515): n is a, c, g, or t
  misc_feature (517)..(517): n is a, c, g, or t
tttttttttttttttgctgttcataagtttattatctatatctgaaaaaatcatagaaaattgctgggtttagctctcagcagcccgctcctgagctctgaggaagcttgccttcttttgagctacccgatccttcttctgagcaagggacattttgggacggttccacctcttctttttaacttctttcttgggcttcttttcatagactggattctctcgtatagcancatgagctttcttatacatctcctccatcatgtctggagttacgctgttctttatgtattgagagaactgtttcttgtaagcatcttcatcttcttccattaagtagcgcatgtaatctgcaacattctggcccatgatgtgcttccgatgtacttctgcattaaattccttggctttcagaatcataaccagggaatcgtttggtactgtgagggatagacaagcctccatccacagctcccttcagggcaccaaaaactttattgccagtggtagttcngggnangcctgcatccaaatagcaggtgaagga

SEQ ID NO: 1350 - DNA, 490 bp, Artificial Sequence
  Description of Artificial sequences:primer
  misc_feature (1)..(490): 5' terminal sequence from clone image:549200. ribosomal protein l5(RPL5) gene.
  misc_feature (20)..(20): n is a, c, g, or t
  misc_feature (274)..(274): n is a, c, g, or t
cttctgtcgagcagcggacncggtctctgttccgcagatggggtttgttaaagttgttaagaataaggcctactttaagagataccaagtgaaatttagaagacgacgagagggtaaaactgattattatgctcggaaacgcttggtgatacaagataaaaataaatacaacacacccaaatacaggatgatagttcgtgtgacaaacagagatatcatttgtcagattgcttatgccccgtatagagggggatatgatagtctgcgcacgtantgcacaccgaactgccaaaatatggtgttgaaggttggcctgacaaattatgctgcagcatatttgtactggcctgctgctgggcccgcaggctttctcaataggtttggcatgggacaagatctatgaaggccaagtggaggtgactggtgatgaatacaatgtggaaagcattgatggtcagccaggtgccttcacctgctattttggatgcag

SEQ ID NO: 1351 - DNA, 410 bp, Artificial Sequence
  Description of Artificial sequences:primer
  misc_feature (1)..(410): 5' terminal sequence from clone image:549212. nucleophosmin (nucleolar phosphoprotein b23, numatrin)(NPM1) gene.
  misc_feature (3)..(3): n is a, c, g, or t
  misc_feature (177)..(177): n is a, c, g, or t
  misc_feature (180)..(180): n is a, c, g, or t
  misc_feature (187)..(187): n is a, c, g, or t
  misc_feature (190)..(190): n is a, c, g, or t
  misc_feature (198)..(198): n is a, c, g, or t
  misc_feature (200)..(201): n is a, c, g, or t
  misc_feature (203)..(203): n is a, c, g, or t
  misc_feature (208)..(208): n is a, c, g, or t
  misc_feature (210)..(210): n is a, c, g, or t
  misc_feature (223)..(224): n is a, c, g, or t
  misc_feature (235)..(236): n is a, c, g, or t
  misc_feature (239)..(239): n is a, c, g, or t
  misc_feature (241)..(241): n is a, c, g, or t
  misc_feature (248)..(248): n is a, c, g, or t
  misc_feature (250)..(250): n is a, c, g, or t
  misc_feature (253)..(253): n is a, c, g, or t
  misc_feature (257)..(258): n is a, c, g, or t
  misc_feature (261)..(261): n is a, c, g, or t
  misc_feature (263)..(263): n is a, c, g, or t
  misc_feature (266)..(266): n is a, c, g, or t
  misc_feature (269)..(270): n is a, c, g, or t
  misc_feature (276)..(277): n is a, c, g, or t
  misc_feature (280)..(280): n is a, c, g, or t
  misc_feature (283)..(283): n is a, c, g, or t
  misc_feature (292)..(292): n is a, c, g, or t
  misc_feature (297)..(297): n is a, c, g, or t
  misc_feature (303)..(304): n is a, c, g, or t
  misc_feature (312)..(312): n is a, c, g, or t
gtncctgcgcggttgttctctggagcagcgttcttttatctccgtccgccttctctcctacctaagtgcgtgccgcacccgatggaagattcgatggacatggacatgagccccctgaggccccagaactatcttttcggttgtgaactaaaggccgacaaagattatcactttaangtngataatnatnaaaatgancnncnattancnttaagaacggtcnntttaaggggcnngtncnaaggatnanttncacnntgntnaanccnnagccannganttncgaaggcantcccntttaanntaacactnggcaactttgaaaaatgtctggtacagcccaacggtttcccttgggggctttgaaataacaccaccagtgggtcttaaggttgaagtgtggttcaggg

SEQ ID NO: 1352 - DNA, 1347 bp, Artificial Sequence
  Description of Artificial sequences:primer
  misc_feature (1)..(1347): nucleophosmin (nucleolar phosphoprotein b23, numatrin)(NPM1) gene.
ggggcctggtgtgattccgtcctgcgcggttgttctctggagcagcgttcttttatctccgtccgccttctctcctacctaagtgcgtgccgccacccgatggaagattcgatggacatggacatgagccccctgaggccccagaactatcttttcggttgtgaactaaaggccgacaaagattatcactttaaggtggataatgatgaaaatgagcaccagttatctttaagaacggtcagtttaggggctggtgcaaaggatgagttgcacattgttgaagcagaggcaatgaattacgaaggcagtccaattaaagtaacactggcaactttgaaaatgtctgtacagccaacggtttcccttgggggctttgaaataacaccaccagtggtcttaaggttgaagtgtggttcagggccagtgcatattagtggacagcacttagtagctgtggaggaagatgcagagtcagaagatgaagaggaggaggatgtgaaactcttaagtatatctggaaagcggtctgcccctggaggtggtagcaaggttccacagaaaaaagtaaaacttgctgctgatgaagatgatgacgatgatgatgaagaggatgatgatgaagatgatgatgatgatgattttgatgatgaggaagctgaagaaaaagcgccagtgaagaaatctatacgagatactccagccaaaaatgcacaaaagtcaaatcagaatggaaaagactcaaaaccatcatcaacaccaagatcaaaaggacaagaatccttcaagaaacaggaaaaaactcctaaaacaccaaaaggacctagttctgtagaagacattaaagcaaaaatgcaagcaagtatagaaaaaggtggttctcttcccaaagtggaagccaaattcatcaattatgtgaagaattgcttccggatgactgaccaagaggctattcaagatctctggcagtggaggaagtctctttaagaaaatagtttaaacaatttgttaaaaaattttccgtcttatttcatttctgtaacagttgatatctggctgtcctttttataatgcagagtgagaactttccctaccgtgtttgataaatgttgtccaggttctattgccaagaatgtgttgtccaaaatgcctgtttagtttttaaagatggaactccaccctttgcttggttttaagtatgtatggaatgttatgataggacatagtagtagcggtggtcagacatggaaatggtggggagacaaaaatacacatgtgaaataaaactcagtattttaataaagtaaaaaaaaaaaaaaccaaaaaaaaaaaaaaaaaaaaaaaaaaaaa

SEQ ID NO: 1353 - DNA, 484 bp, Artificial Sequence
  Description of Artificial sequences:primer
  misc_feature (1)..(484): 3' terminal sequence from clone image:549361. cytochrome c oxidase subunit vb(COX5B) gene.
  misc_feature (13)..(13): n is a, c, g, or t
  misc_feature (123)..(123): n is a, c, g, or t
  misc_feature (389)..(389): n is a, c, g, or t
  misc_feature (410)..(410): n is a, c, g, or t
  misc_feature (413)..(413): n is a, c, g, or t
  misc_feature (420)..(420): n is a, c, g, or t
  misc_feature (426)..(426): n is a, c, g, or t
  misc_feature (438)..(438): n is a, c, g, or t
tttttttttttangggagaaggagccaatgcaatggctagtctttactggaaagaagaaactttacagcacattttgagtaatttagtgcaggtgctcagtgtgccagctgctggggcaccantttgtaatgggctccacagcgggggcatcgctgggcctcgctttgtgcagccaaaaccagacgacgctggtattgtcctcttcacagatgcagcctactattctcttgttggagatggaggggactaaattagggtcttccctggtgcctgaagctccctttggggccagtacattgtatggggtccagtcccttctttgcagccagcatgatctccctctccaacccagtcgcctgctcttcatcagttgggaacaccacctccngatgccatggagcgcatcggnaanggcccantggggncggagccctcanggcttgcgcgccaagcgtttccagctccggaaagtaaccttgaagc

SEQ ID NO: 1354 - DNA, 468 bp, Artificial Sequence
  Description of Artificial sequences:primer
  misc_feature (1)..(468): 3' terminal sequence from clone image:550315. protein phosphatase 2 (formerly 2a), catalytic subunit, alpha isoform(PPP2CA) gene.
  misc_feature (159)..(159): n is a, c, g, or t
  misc_feature (415)..(415): n is a, c, g, or t
  misc_feature (429)..(430): n is a, c, g, or t
  misc_feature (438)..(438): n is a, c, g, or t
  misc_feature (451)..(451): n is a, c, g, or t
  misc_feature (457)..(457): n is a, c, g, or t
  misc_feature (460)..(460): n is a, c, g, or t
gcaagtcacacattggaccctcatggggaacttcttgtaggcgatcaagtgctctgatatgatccagtgtatctatagatggcgagagaccaccatgtagacagaagatctgcccatccaccaaggcagtgagaggaagatagtcaaaaagatctgtanaatatttccaaacatttgcatttccatattttcttaaacattcatcatagaaaccataaacttgtgtgatctgtctgctctcatgattccctcgaagaatggtgatgcgttcacggtaacgaaccttaagatgctacaagcaagtgtaactgtttcaacttgaataatatcctctgtcaacataatctcccataaacaagtaatttgtatctggtggttttgccaccaattctaaacagttccatggagatcatgnaattgcccatgcannttctccanagacaggtaactngacatngancctcttgc

SEQ ID NO: 1355 - DNA, 561 bp, Artificial Sequence
  Description of Artificial sequences:primer
  misc_feature (1)..(561): 5' terminal sequence from clone image:550315. protein phosphatase 2 (formerly 2a), catalytic subunit, alpha isoform(PPP2CA) gene.
  misc_feature (21)..(21): n is a, c, g, or t
  misc_feature (24)..(24): n is a, c, g, or t
  misc_feature (31)..(31): n is a, c, g, or t
  misc_feature (34)..(34): n is a, c, g, or t
  misc_feature (66)..(66): n is a, c, g, or t
  misc_feature (118)..(118): n is a, c, g, or t
  misc_feature (129)..(129): n is a, c, g, or t
  misc_feature (133)..(133): n is a, c, g, or t
  misc_feature (144)..(144): n is a, c, g, or t
  misc_feature (153)..(153): n is a, c, g, or t
  misc_feature (197)..(197): n is a, c, g, or t
  misc_feature (215)..(216): n is a, c, g, or t
  misc_feature (250)..(250): n is a, c, g, or t
  misc_feature (252)..(252): n is a, c, g, or t
  misc_feature (272)..(272): n is a, c, g, or t
  misc_feature (295)..(295): n is a, c, g, or t
  misc_feature (350)..(350): n is a, c, g, or t
  misc_feature (509)..(509): n is a, c, g, or t
  misc_feature (533)..(533): n is a, c, g, or t
  misc_feature (541)..(541): n is a, c, g, or t
  misc_feature (561)..(561): n is a, c, g, or t
gcgagcggaggaggaggcgcnggnccgacgnagntactgcggtgagagccagcgggccagcgccanctcaacagccgccagaagtacacgaggaaccggcggcggcgtgtgcgtgtangcccgtgtgcngtgncggcgcgggangagccggancagccggctggggcgggtggcatcatggacgagaaggtgttcancaaggagctggaccagtnnatcgagcagctgaacgagtgcaagcagctatttncntcccaggtcaagagcctctncagaaggctaaagaaatcctganaaaagaatccaacgtgcaagaggttcgatgtccagttactgtctgtggagatgtncatgggcaatttcatgatctcatggaactgtttagaattggtggcaatcaccagatacaaattacttgtttatgggagattatgttgacagaggatattattcagttgaaacagttacactgcttgtagctcttaagttcgttaccgtgaacgcatcancattcttcagggaatcatagagcngacagatnacacagtttatggttctatn

SEQ ID NO: 1356 - DNA, 424 bp, Artificial Sequence
  Description of Artificial sequences:primer
  misc_feature (1)..(424): 3' terminal sequence from clone image:561922. myosin, heavy polypeptide 1, skeletal muscle, adult(MYH1) gene.
ttttggcagataaattttttatctccaaaagtcataagtacaaaatggagtgacaaagattttcacattttgtgcatttctttggtcacctttcagcagttagataaattactcttcacttatgatttttgtgtgaacctccctgctcttcaccctcagcttgttgacctgggactcagcaatgtcagcccgttcctcggcctcctccagctcgtgctggatcctgcggaatttggagaggttgacgttggattgttcctccgcttcttcagcttgtctcttgtaggatttcacctttgcttgcagtttgtccaccaggtcctggagcctgagaatattcttgcggtcttcctcagtttggtaagtgaagttccttccacttttctctcatggtttggcgtagacccttgacagcttcaacatt

SEQ ID NO: 1357 - DNA, 407 bp, Artificial Sequence
  Description of Artificial sequences:primer
  misc_feature (1)..(407): 5' terminal sequence from clone image:561922. myosin, heavy polypeptide 1, skeletal muscle, adult(MYH1) gene.
  misc_feature (36)..(37): n is a, c, g, or t
  misc_feature (117)..(117): n is a, c, g, or t
  misc_feature (232)..(232): n is a, c, g, or t
gatgctgagatcaggagcaggaatgatgccattagnntcaagaagaagatggagggagacctcaatgaaatggaaatccagctgaaccatgccaaccgcatggcatgctgaggcccntgaggaactataggaacacccaagccatcctcaaggatacccagctccacctggatgatgctctccggagccaggaggacctgaaggaacagctggctatggtggagcgcagaancaacctgctgcaggctgagatcgaggagctgcgggccactctggaacagacaagagaggagcaggaaaattcgcagaaccaggagctccctggattgccagttgagccgttttcagcttccttgccacaccccagaacaccagccttgatttaacaccccaagaaagaagcttgg

SEQ ID NO: 1358 - DNA, 5925 bp, Artificial Sequence
  Description of Artificial sequences:primer
  misc_feature (1)..(5925): myosin, heavy polypeptide 1, skeletal muscle, adult(MYH1) gene.
atgagttctgactctgagatggccatttttggggaggctgctcctttcctccgaaagtctgaaagggagcgaattgaagcccagaacaagccttttgatgccaagacatcagtctttgtggtggaccctaaggagtcctttgtgaaagcaacagtgcagagcagggaaggggggaaggtgacagctaagaccgaagctggagctactgtaacagtgaaagatgaccaagtcttccccatgaaccctcccaaatatgacaagatcgaggacatggccatgatgactcatctacacgagcctgctgtgctgtacaacctcaaagagcgctacgcagcctggatgatctacacctactcaggcttgttctgtgtcactgtcaacccctacaagtggttgccagtgtataatgcagaagtggtgacagcctaccgaggcaaaaagcgccaggaagccccaccccacatcttctccatctctgacaatgcctatcagttcatgctgactgatcgggagaatcagtctatcttgatcaccggagaatctggcgcagggaagactgtgaacaccaagcgtgtcatccagtactttgcaacaattgcagttactggggagaagaagaaggaagaagttacttctggcaaaatgcaggggactctggaagatcaaatcatcagtgccaaccccctactggaggcctttggcaacgccaagaccgtgaggaatgacaactcctctcgctttggtaaattcatcaggatccacttcggtaccacagggaaactggcttctgctgatattgaaacatatcttctggagaagtctagagttactttccagctaaaggctgaaagaagctatcatattttttatcagatcatgtctaacaagaagccagatctaattgaaatgctcctgatcaccaccaacccatacgattatgccttcgtcagtcaaggggagatcacagtgcccagcattgatgaccaagaagagttgatggctacagatagtgccattgaaattctgggctttacttcagatgaaagagtgtccatctataagctcacaggggctgtgatgcattatgggaacatgaaattcaagcaaaagcagcgtgaggagcaagctgagccagatggcactgaagttgctgacaaggcagcctatctccaaaatctgaactctgcagatctgctcaaagccctctgctaccctagggtcaaggtcggcaatgagtatgtcaccaaaggtcaaactgtgcagcaggtgtacaatgcagtgggtgctctggccaaagctgtctacgataagatgttcttgtggatggtcacccgcatcaaccagcagctggacaccaagcagcccaggcagtacttcattggggtcttggacattgctggctttgagatctttgatttcaacagcctggagcagctgtgcatcaacttcaccaatgagaaactgcaacagtttttcaaccaccacatgttcgtgctggagcaggaggagtacaagaaggaaggcattgagtggacgttcattgactttgggatggacctggctgcctgcatcgagctcatcgagaagcctatgggcatcttctccatcctggaagaggagtgcatgttccccaaggcgacagacacctccttcaagaacaagctgtatgaacaacatcttggaaaatccaataacttccagaagcccaagcctgccaaaggcaagcctgaggcccacttctctttgattcactatgctggcaccgtggactacaacattgccggctggcttgacaagaacaaggaccccctgaatgagactgtggtggggctgtaccagaagtctgcaatgaagactctggctctcctctttgttggggcaacgggagcggaagcagaggctggcggtggaaagaaaggtggtaagaagaagggttcttctttccagactgtgtcggctctcttcagggagaatttgaataagctgatgaccaacttgaggagcactcacccccactttgtgcggtgcatcatccccaatgaaactaaaactcctggtgccatggagcatgagcttgtcctgcatcagctgaggtgtaacggtgtgctggaaggcatccgcatctgcaggaaaggcttcccaagcagaatcctttatgcagacttcaaacagagatacaaggtgttaaatgcaagtgctatccctgaaggacaattcatcgatagcaagaaggcttcagagaagctcctggggtccattgacattgaccacacccagtataaatttggtcacaccaaggtctttttcaaagctggtcttctggggctcctagaggagatgcgagatgagaagctggcccagctgattacccgaacccaggccatgtgcagagggttcttggcaagagtggagtaccagaaaatggtggaaagaagagagtccatcttctgcatccagtacaatgtccgtgccttcatgaatgtcaagcactggccctggatgaagctgtatttcaagatcaaacccctcctcaaaagtgcagagacagagaaggagatggccaacatgaaggaagaatttgagaaaaccaaagaagagctggctaagaccgaggcaaaaaggaaagagctggaagaaaaaatggtgactctgatgcaagaaaaaaatgacttgcaactccaggttcaagctgaagctgacagcttggctgatgcagaggaaaggtgtgaccagctaatcaaaaccaaaatccagctagaagccaaaatcaaagaggtgactgagagagctgaggatgaggaagagatcaatgctgagctgacagccaagaagaggaaactggaggatgaatgttcagaactcaagaaagacattgatgaccttgagctgacactggccaaggttgagaaggagaaacatgccacagaaaacaaggtgaaaaacctcacagaagagatggcgggtctggatgaaaccattgctaagctgaccaaggagaagaaggctctccaggaggcccaccagcagaccctggatgacctgcaggcagaggaggacaaagtcaacaccctgaccaaagctaaaatcaaacttgaacaacaagtggatgatcttgaaggatctttggaacaagaaaagaaaatccggatggatctagaaagagcaaagagaaaactagagggagacctaaaattggctcaagaatccgcaatggatatagaaaatgacaaacaacaacttgatgaaaagcttaaaaagaaagagtttgaaatgagcggtctgcaaagcaagattgaagatgaacaagcccttggtatgcagctgcagaagaaaatcaaggagttacaagcccgcattgaggagctggaggaggaaatcgaggcagagcgggcctcccgggccaaagcagagaagcagcgctctgatctctcccgggagctggaggagatcagtgagaggctggaagaagccggtggggccacctcggcccagattgagatgaacaagaagcgggaagctgagttccagaaaatgcgcagggacctggaggaggccaccctacagcatgaggccacggcggccaccctgaggaagaagcatgcagatagtgtggccgagcttggggagcagattgacaacctgcagcgagtgaagcagaagctggagaaggagaagagtgagatgaagatggagatcgatgaccttgctagtaacatggagactgtctccaaagccaagggaaaccttgaaaagatgtgccgcgctctagaagatcaactgagtgaaattaagaccaaggaagaggagcagcagcggctgatcaatgacctcacagcacagagagcgcgcctgcaaacagaatcaggtgaatattcacgccagctagatgaaaaggacacactagtttcacagctctcgaggggcaaacaagcctttactcaacagattgaggaactgaaaaggcaacttgaagaggagataaaggccaagagtgccctggcacatgccctgcagtcctcccgccatgactgtgacctgctgcgggaacagtatgaggaggagcaggaagccaaggccgagctacagagagcaatgtccaaggccaacagtgaggttgcccagtggaggaccaaatatgagacagatgccatccagcgcacagaggagctggaggaggccaagaagaagctggctcagcgtctgcaggatgctgaggaacatgtagaagctgtgaatgccaaatgtgcttcccttgagaagacgaagcagaggctccagaatgaagttgaggacctcatgattgatgttgagaggacaaatgctgcctgtgccgccctggacaaaaagcaaaggaactttgataagatcctggcagaatggaaacagaagtgtgaagaaactcatgctgaacttgaagcttctcaaaaggaatcccgctcactcagcacagaactatttaagattaagaatgcttatgaggaatctttagaccaacttgaaaccttgaaacgggaaaataagaatctgcagcaggagatttctgatctcactgaacagattgcagaaggaggaaagcgcatccatgaactggaaaaaataaagaagcaagttgagcaagaaaagtctgaacttcaggctgccttagaggaggcagaggcatctcttgaacatgaagagggaaagatcctgcgcatccagcttgagttgaaccaagtcaagtctgaggttgataggaaaattgctgaaaaagatgaggaaattgaccagatgaagagaaaccacattagaatcgtggagtccatgcagagcacactggatgctgagatcaggagcaggaatgatgccattaggctcaagaagaagatggagggagacctcaatgaaatggaaatccagctgaaccatgccaaccgcatggctgctgaggccctgaggaactataggaacacccaagccatcctcaaggatacccagctccacctagatgatgctctccggagccaagaggacctgaaggaacagctggctatggtggagcgcagagccaacctgctgcaggctgagatcgaggaactacgagccactctggaacagacggagaggagcaggaaaatcgcagaacaggagctcctggatgccagtgaacgtgttcagctcctgcacacccagaacaccagcctgatcaacaccaagaagaagctggagacagacatttcccaaatccagggagagatggaagacatcatccaggaagcccgcaatgcagaagagaaggccaagaaggccatcactgatgctgccatgatggctgaggagctgaagaaggaacaggacaccagcgcccatctggagcggatgaagaagaacttggaacagacggtgaaggacctgcagcatcgtctggatgaggctgagcagctggccctgaagggtgggaagaagcagatccagaaactggaggccagggttcgtgaacttgaaggtgaagttgaaagtgaacagaagcgcaatgttgaagctgtcaagggtctacgcaaacatgagagaaaagtgaaggaactcacttaccaaactgaggaagaccgcaagaatattctcaggctgcaggacctggtggacaagctgcaagcaaaggtgaaatcctacaagagacaagctgaagaagcggaggaacaatccaacgtcaacctctccaaattccggaggatccagcacgagctggaggaggccgaggaaagggctgacattgctgagtcccaggtcaacaagctgagggtgaagagcagggaggttcacacaaaaatcataagtgaagagtaatttatctaactgctgaaaggtgaccaaagaaatgcacaaaatgtgaaaatctttgtcactccattttgtacttatgacttttggagataaaaaatttatctgcca

SEQ ID NO: 1359 - DNA, 426 bp, Artificial Sequence
  Description of Artificial sequences:primer
  misc_feature (1)..(426): 3' terminal sequence from clone image:561948. actin, alpha 1, skeletal muscle(ACTA1) gene.
  misc_feature (414)..(414): n is a, c, g, or t
tttttttttttcgcagcttaacagaatgactttaatgcttcttcaagttttccattttcttccacagggctttgtttcgaaaaataacaaaatgaggtaataagttaatgtatgtacacgttataaacactgtgtcagtttacgatggcagcaacggaagttgttacaaagaaagtgactgcggggtggctggagctcagccgcccccccattgagaagattcgtcgtcctgagaagtcgcgtgctggaggtggagtgtgtctagaagcatttgcggttggacgatggaagggccggcctcgtccgtactcctgcttggtgatccacatctgctggaaggtggacagcgaggccaggatggagccgccgatccacaccgagtatttgcgctccggcggggcgaatgatcttgantcttcatgggtt

SEQ ID NO: 1360 - DNA, 394 bp, Artificial Sequence
  Description of Artificial sequences:primer
  misc_feature (1)..(394): 5' terminal sequence from clone image:561948. actin, alpha 1, skeletal muscle(ACTA1) gene.
  misc_feature (55)..(55): n is a, c, g, or t
  misc_feature (57)..(57): n is a, c, g, or t
  misc_feature (59)..(59): n is a, c, g, or t
  misc_feature (75)..(75): n is a, c, g, or t
  misc_feature (77)..(77): n is a, c, g, or t
gaccaccgccctcgtgtgcgacaaatggctccggcctggtgaaagccggcttcgngngnaatgacgcccctaggncngtgttcccgtccatcgtgggccgcccccgacaccagggcgtcatggtcggtatgggtcagaaagattcctacgtgggcgacgaggctcagagcaagagaggtatcctgaccctgaagtaccctatcgagcacggcatcatcaccaactgggatgacatggagaagatctggcaccacaccttctacaacgagcttcgcgttggctcccgaggagcaccccaccctgctcaccgaggcccccctcaatcccaaggccaaccgcgagaagatgacccagatcatgttttgagaccttcaacgtgcccgcccatgtacgt

SEQ ID NO: 1361 - DNA, 1374 bp, Artificial Sequence
  Description of Artificial sequences:primer
  misc_feature (1)..(1374): actin, alpha 1, skeletal muscle(ACTA1) gene.
accgcagcggacagcgccaagtgaagcctcgcttccctcccgcggcgaccagggcccgagccgagagtagcagttgtagctacccgcccagaaactagacacaatgtgcgacgaagacgagaccaccgccctcgtgtgcgacaatggctccggcctggtgaaagccggcttcgccggggatgacgcccctagggccgtgttcccgtccatcgtgggccgcccccgacaccagggcgtcatggtcggtatgggtcagaaagattcctacgtgggcgacgaggctcagagcaagagaggtatcctgaccctgaagtaccctatcgagcacggcatcatcaccaactgggatgacatggagaagatctggcaccacaccttctacaacgagcttcgcgtggctcccgaggagcaccccaccctgctcaccgaggcccccctcaatcccaaggccaaccgcgagaagatgacccagatcatgtttgagaccttcaacgtgcccgccatgtacgtggccatccaggccgtgctgtccctctacgcctccggaaggaccaccggcatcgtgctggactccggcgacggcgtcacccacaacgtgcccatttatgagggctacgcgctgccgcacgccatcatgcgcctggacctggcgggccgcgatctcaccgactacctgatgaagatcctcactgagcgtggctactccttcgtgaccacagctgagcgcgagatcgtgcgcgacatcaaggagaagctgtgctacgtggccctggacttcgagaacgagatggcgacggccgcctcctcctcctccctggaaaagagctacgagctgccagacgggcaggtcatcaccatcggcaacgagcgcttccgctgcccggagacgctcttccagccctccttcatcggtatggagtcggcgggcattcacgagaccacctacaacagcatcatgaagtgtgacatcgacatcaggaaggacctgtatgccaacaacgtcatgtcggggggcaccacgatgtaccctgggatcgctgaccgcatgcagaaagagatcaccgcgctggcacccagcaccatgaagatcaagatcatcgccccgccggagcgcaaatactcggtgtggatcggcggctccatcctggcctcgctgtccaccttccagcagatgtggatcaccaagcaggagtacgacgaggccggcccttccatcgtccaccgcaaatgcttctaacacactccacctccagcacgcgacttctcaggacgacgaatcttctcaatgggggggcggctgagctccagccaccccgcagtcactttctttgtaacaacttccgttgctgccatcgtaaactgacacagtgtttg

SEQ ID NO: 1362 - DNA, 429 bp, Artificial Sequence
  Description of Artificial sequences:primer
  misc_feature (1)..(429): 3' terminal sequence from clone image:562021. titin(TTN) gene.
ttttttttttttttgaggtgcagatagcttgctttattttgttgttactatctcaaggaggtccaacaattataactaacaattgaatttatacttgcatgaaaagaactacatcaaattgacattttgggcaattagtaatattgtttaaaatttaacaacagctttattttgttgttgttctttactttttgctgtggctcattgcttaggtgcccaggtttttcaggtgcaattaaaatttagaactaccacacaaaggcattggctgcactctgggacctccaagagttggcactgctctggcataggaatacttgaatagcttggttaaatgaagggatggccaggagatgttacttttccaagctattcaggcactccttatgtcagagacagcgtaaaatgagcgaacaaagtgttggccgt

SEQ ID NO: 1363 - DNA, 448 bp, Artificial Sequence
  Description of Artificial sequences:primer
  misc_feature (1)..(448): 5' terminal sequence from clone image:562021. titin(TTN) gene.
gcaagccagtcacagagatgaaggaatcctcacctgcataagcaaaaccaaggaaggaatcgtcaagtgtcagtatgatttgacactgagcaaagaactctcagatgctccagccgttcatctcacagcctagatctcaaaatattaatgaaggacaaaatgttctctttacttgtgaaatcagtggcgagccatcccctgaaatcgaatggtttaaaaacaacctgccaatttctatttcttcaaatgtcagcataagccgctccagaaatgtatactcccttgaaatcccgaaatgcatcagtcagcgacagtggaaagtacacaattaaggccaaaaatttccgtggccagtgttcagctacagcttccttaatgggtccttcctctagttgaagaaccttccagagagggtagtattgagaacaagtggtgacacaagcttggg

SEQ ID NO: 1364 - DNA, 104299 bp, Artificial Sequence
  Description of Artificial sequences:primer
  misc_feature (1)..(104299): titin(TTN) gene.
agcagtcgtgcattcccagcctcgcctcgggtgtagggattgcatagaaaagcaaaactacacagtcttgactgtgtagttttgtttttaggattagaggctcaccgattcatgtcggagatggtcagaaaaaccaactctccataggacgtcgtttcagaagcaaccttgggcttagtcccaccctttttaggcactcttgagaaatcaagtgcctagaaagatgacaactcaagcaccgacgtttacgcagccgttacaaagcgttgtggtactggagggtagtaccgcaacctttgaggctcacattagtggttttccagttcctgaggtgagctggtttagggatggccaggtgatttccacttccactctgcccggcgtgcagatctcctttagcgatggccgcgctaaactgacgatccccgccgtgactaaagccaacagtggacgatattccctgaaagccaccaatggatctggacaagcgactagtactgctgagcttctcgtgaaagctgagacagcaccacccaacttcgttcaacgactgcagagcatgaccgtgagacaaggaagccaagtgagactccaagtgagagtgactggaatccctacacctgtggtgaagttctaccgggatggagccgaaatccagagctcccttgatttccaaatttcacaagaaggcgacctctacagcttactgattgcagaagcataccctgaggactcagggacctattcagtaaatgccaccaatagcgttggaagagctacttcgactgctgaattactggttcaaggtgaagaagaagtacctgctaaaaagacaaagacaattgtttcgactgctcagatctcagaatcaagacaaacccgaattgaaaagaagattgaagcccactttgatgccagatcaattgcaacagttgagatggtcatagatggtgccgctgggcaacagctgccacataaaacacctcccaggattcctccgaagccaaagtcaagatccccaacaccaccgtctattgctgccaaagcacagctggctcggcagcagtccccatcgcccataagacactccccttccccggtcagacacgtgcgggcaccgaccccatctccggtcaggtccgtgtctccagcagcaagaatctccacatcccccatcaggtctgttaggtctccattgctcatgcgtaagactcaggcatccaccgtggccacaggtcctgaagtgcctcccccttggaagcaagagggctacgtggcctcctcatctgaggctgagatgagagagacaacgctgacaacctctactcagatcaggacagaagagagatgggaagggagatacggtgtccaggagcaagtgaccatcagtggtgctgcgggtgctgccgccagtgtgtcggccagtgctagctacgcagcagaggctgttgccactggtgctaaagaggtgaaacaagatgctgacaaaagtgcagctgttgcgactgttgttgctgccgttgatatggccagagtgagagaaccagtgatcagcgctgtagagcagactgctcagaggacaaccacgactgctgtgcacatccaacctgctcaagaacaggtaagaaaggaagcggagaagactgctgtaactaaggtagtagtggccgccgataaagccaaggaacaagaattaaaatcaagaaccaaagaagtaattaccacaaagcaagagcagatgcacgtaactcatgagcagataagaaaagaaactgaaaaaacatttgtaccaaaggtagtaatttccgcagctaaagccaaagaacaagaaactagaatttctgaagaaattactaagaaacagaaacaagtaactcaagaagcaataagacaggaaactgagataactgctgcatccatggtggtagttgccactgcaaagtccacaaaactagaaacagtcccgggagctcaagaagaaactaccacacaacaagatcaaatgcacctaagttatgaaaagataatgaaggaaactaggaaaacagttgtacctaaagtcatagttgccacacccaaagtcaaagaacaagatttagtatcaagaggtagagaaggcattactaccaaaagagaacaagtgcaaataactcaggagaagatgagaaaggaagccgagaaaactgccttgtctacaatagcagttgctactgctaaagccaaagaacaagaaacaatactgagaactagagaaactatggctactagacaagaacaaatccaagttacccatggaaaggtggacgttggaaaaaaggctgaagctgtagcaacagttgttgctgcagtagaccaggcccgagtcagagagcccagagagcctgggcatcttgaagaatcctatgctcagcagaccactttggagtacggatataaggaacgcatttccgccgcaaaggtagctgagcctccccaacgtccagcctcagaaccccacgttgtccctaaagcagtcaagcctagagtaatccaggctccttctgagactcatatcaaaactactgatcaaaagggaatgcacatatcatcacagatcaagaaaactacagatctaacaacggaaagattagtccatgtggataaacgcccccgcacagctagccctcactttactgtttcaaaaatttctgttcctaagacagaacatggatatgaggcatcaatagccggtagtgctattgccacattacaaaaagagttgtcagccacatcttctgctcagaagatcaccaaatcggtgaaggctcctactgtgaagcccagtgagactagagtaagggcagagcccacacccttgccacagttccccttcgctgacacaccagatacttacaagagtgaagctggcgttgaggtgaaaaaggaagtaggggtgagcatcactggcaccaccgtccgtgaagagcgctttgaagtactgcacggacgcgaagccaaggtaacagaaacagcaagagtaccagcacctgttgaaattcctgttactccaccaactttggtctcgggcttaaaaaatgtgactgtcatagaaggtgaatctgtcaccttggagtgccacatctctggatacccatccccgacagtgacatggtacagggaagactaccaaatcgaaagttccattgacttccagataaccttccagagtggaattgctcgtcttatgattcgcgaagcatttgcggaagacagcgggcgatttacttgcagtgctgtaaatgaggctggaaccgtcagcacatcctgctatctggctgtgcaggtgtcagaagaatttgaaaaggaaaccacagccgtgactgagaaatttactacagaagagaaacgctttgttgagtcaagagatgtggttatgactgatactagcctcacagaggaacaagcagggcctggagaacctgccgcgccttactttattacaaaaccagtggtccagaaactggtggaaggtgggagcgtggtgtttggatgccaagttggcggcaacccaaagccccatgtatactggaaaaaatctggtgttcctctaaccactggatacagatacaaagtgagttacaacaaacaaaccggtgaatgcaagctggtgatttctatgacttttgctgatgatgctggagaatacactattgttgttcgcaataagcatggagaaacttctgcatctgcttccttgcttgaagaagctgattatgagttactgatgaagtcccagcaagaaatgctttatcagacacaagtgactgcatttgttcaagaacctaaagttggagaaacagcacctggatttgtatactctgagtatgaaaaagagtatgaaaaagaacaagccttaattaggaagaaaatggccaaagatactgtagtggtcagaacttatgtagaagatcaggaattccatatttcttcctttgaagagagacttattaaagaaattgaatatagaataataaagactacattagaagaacttcttgaagaagatggagaagaaaagatggcagttgacatttctgaatctgaagctgttgaatcaggatttgatttaagaatcaagaattatagaattcttgaggggatgggtgtcacttttcattgcaagatgtctggatatccattaccaaagattgcttggtacaaagatggcaagcgcatcaaacatggagaaagataccaaatggactttctacaagatggcagagctagtctgcgtatacctgttgttcttccagaagatgaaggaatctacactgcatttgccagcaatattaaaggaaatgcaatttgctcagggaaattgtatgtggagcctgctgcaccacttggagctccgacttacattcccacactagagccagtgagcagaatcagatctctctctccacgttcagtgagcaggtctcctatacgcatgtctcctgcacggatgtcacctgcaaggatgtctcctgcacggatgtcccctgcaagaatgtcccctggacgtaggctggaggagacagatgagtcacaacttgagagactatataaaccagtctttgtgttaaaacctgtttctttcaaatgtttagaagggcaaactgccagatttgacttaaaggttgttggtagacctatgccagagacgttctggtttcatgatggccagcaaattgtcaatgactatacccataaagtagtcattaaagaagatggtactcaatcactaattattgtccctgccacacccagtgattctggggaatggactgtggttgcccaaaacagggcaggcagatcttcaatttcagtgattttaactgtggaagctgtggaacatcaggtaaaaccgatgtttgtagaaaaactgaaaaatgtcaatataaaggaaggttcccgacttgaaatgaaagtcagagctacgggtaaccccaaccctgacattgtatggttgaaaaacagtgacatcattgtgcctcataaatatcccaaaatcagaattgaaggaaccaagggagaagctgcccttaaaatcgattccactgtcagccaagattctgcctggtatactgcgactgctattaataaagctggcagagacactacaagatgcaaagtaaatgttgaagttgagtttgcagagcctgagccagagagaaagttaatcatcccacgggggacatatagagcaaaggagattgcagccccagaactggagcccctccatttgcgatatggccaagagcaatgggaagaaggtgatctctatgacaaagagaaacaacagaaaccatttttcaagaaaaaactcacttccttaagacttaagcgctttgggcctgcccactttgaatgcaggctaacacccattggtgacccaacgatggtggtggagtggctccatgatggaaagccacttgaagcagccaacaggctccgtatgatcaatgaatttgggtactgcagccttgattatggcgttgcatattctagagacagtggtatcattacttgcagagccactaacaaatatggaacagatcacacatctgctacccttattgttaaagatgagaaaagtcttgtggaagaatcccaattgcctgaggggaggaaaggcttacagagaattgaagaattagagagaatggctcatgaaggtgcacttacaggtgtaacaacagatcagaaagaaaagcaaaagccagacattgtcttgtacccagagccagttagagtacttgaaggggagactgcaaggttccgctgcagggtaacaggctaccctcagcccaaagtcaactggtacctcaatggacagctcatccgcaaaagcaaaaggttcagagttcgctatgatggtatccattacctggacatcgtggactgcaaatcatatgacacaggtgaagtgaaggtcaccgcggaaaatcctgaaggtgtgatagagcataaagtgaagcttgagattcaacagagggaagattttaggtctgtccttaggagagctcctgaaccaaggcctgagtttcacgtacatgaaccaggaaagcttcagtttgaagtacaaaaagtggatagacctgttgacaccactgaaaccaaagaagttgtgaagttgaaaagggctgaaagaattacccatgaaaaagtgcctgaagagtcggaagagctgcgcagtaaattcaagcgcagaacagaagagggctattatgaagccattaccgctgtggagctcaagtctcgaaagaaggatgaatcctatgaggaactcctcaggaagacaaaagatgaacttctccactggaccaaagagttaactgaagaggaaaagaaagctcttgccgaagaaggcaaaatcacgattccaacttttaaacctgacaagattgaactaagtcctagtatggaggctccaaaaatcttcgaaagaatccagagccaaacagtgggccaaggatctgatgcacacttccgggtcagagtcgtggggaaaccagaccccgaatgtgaatggtacaaaaatggtgtcaaaattgaacggtctgaccggatctactggtactggcccgaagacaatgtttgtgaattggtcataagagatgtgactgctgaggactctgccagcatcatggtaaaagccatcaacatagctggagaaacctccagtcacgcattcttacttgtccaagccaagcaattgatcactttcacacaggaattacaagatgttgttgctaaggaaaaagacactatggcaacctttgaatgtgaaacttcagaaccatttgtcaaagtgaaatggtataaagatggtatggaggttcatgagggagataaatacaggatgcactctgacagaaaggttcacttcctctccatactgaccattgatacgtctgatgctgaagattacagctgtgtacttgtggaagatgaaaatgtcaaaacgactgctaaacttattgttgaaggtgcagttgttgagtttgtgaaagaacttcaggacatagaagttccagaatcatattcaggagaattagagtgcattgtatccccagaaaatatagaaggaaaatggtatcataatgatgtggagcttaaatccaatggcaaatatacaattacatctcgtcgtggacgtcagaacctcacggtcaaggatgtaaccaaggaggaccagggagaatacagctttgtcatcgacgggaaaaagacaacctgtaaattaaagatgaaaccccgccccattgctatcctacaaggacttagtgaccaaaaagtctgtgagggtgacattgttcagcttgaagttaaagtctccttggaaagtgtggaaggcgtctggatgaaagacggccaagaagtgcagcccagtgacagggttcacattgtgatagacaaacaatctcatatgctgctcattgaagacatgactaaggaagatgctggaaattactctttcaccattccagcccttggcctctccaccagtgggcgtgtctctgtctatagtgtggacgtgataacacctctaaaagatgttaatgtgattgaaggcaccaaggctgtgcttgaatgtaaggtgtcagtccctgatgtgacttctgttaagtggtacttaaatgatgaacaaatcaagcctgatgaccgtgtacaggccattgtgaaaggtactaaacagcgactagtcattaaccgaactcatgcttcagacgaaggaccttacaagctgatagttggcagagttgaaaccaactgtaatctctctgtagaaaaaattaaaattatcagaggtcttcgtgaccttacctgtacagaaactcaaaatgtggtgtttgaggttgagctgtcccactctggaattgatgtcctgtggaattttaaggacaaggaaatcaagcccagttctaaatataaaattgaagcacatggaaaaatatataaattgacagttctaaatatgatgaaagatgatgaaggaaaatacacattttacgcgggagaaaatatcacatctggaaaacttactgtggcaggtggggccatctccaagccactcacagatcagaccgtagctgaatcccaggaagctgtgtttgaatgtgaagttgccaacccagattccaaaggcgaatggttgagggatggcaaacacctaccactgactaacaacatcagaagtgagtctgatggccacaaaaggagacttatcattgctgccaccaaattagatgacattggagaatatacctacaaggtggccacctccaaaacatctgccaaactcaaagttgaagctgtcaaaattaagaagactctgaagaacctcacagtgacagaaacacaggatgctgttttcactgtcgagcttacacaccctaatgtcaaaggtgtccagtggatcaaaaatggagttgtgctggaatccaatgaaaagtatgctatctctgtcaaaggaacaatttactctctgaggattaaaaactgtgccatcgtggatgagtctgtttatggcttcaggcttggaaggcttggagccagtgccagactgcacgtggagactgtcaagatcattaaaaagccaaaggatgtgacagccttggaaaatgccactgttgcctttgaagttagtgtttcccatgacactgttccagtaaaatggttccataagagtgtggaaattaagccaagtgacaaacacagactggtctcagaaaggaaagtccacaagctgatgctgcagaacatctccccctcagatgctggggaatacacagctgtggtcgggcaattggaatgcaaagcaaaactgtttgtggagacattacatattacaaaaaccatgaaaaatatcgaggtgcctgagaccaaaactgcctcttttgagtgtgaggtgtcccacttcaatgtcccttccatgtggctgaagaatggtgtggaaattgagatgagtgaaaagttcaagatagttgtgcagggaaaactccatcagctgatcatcatgaacaccagcacagaggactcggcagaatacacatttgtctgtggcaatgaccaagtcagtgccaccctgacagtcaccccaatcatgattacttccatgctgaaagacatcaacgctgaagaaaaagacactattacttttgaggtgacagtgaactatgaaggcatctcttacaaatggttaaagaatggtgtggaaatcaaatcaactgacaagtgccagatgagaaccaaaaagctcacacactcactgaacatcaggaatgttcactttggggatgctgctgactacacctttgtggctggaaaagcaacatcaacagccacactttatgtggaagctcgtcatatagaatttaggaaacacattaaggacattaaggtactggagaagaagcgagccatgtttgaatgtgaagtttctgaacctgacatcactgtacagtggatgaaagatgaccaggaactgcagatcacagacagaataaagattcagaaggagaaatatgtccaccgccttctgatcccatccacccggatgtctgatgctgggaagtacacagtggtggcaggaggcaacgtgtcaactgcaaaactctttgtagaaggcagagatgttcgcatccgaagtattaaaaaggaggttcaggtcattgagaaacagcgtgctgttgttgaatttgaggtcaatgaagacgatgttgatgcccactggtataaagatggcattgaaatcaatttccaagttcaagaacgacacaaatatgtagtggaaagaagaatccaccgaatgtttatctctgagaccagacagagcgatgcaggagaatacacctttgtggcaggaaggaacaggagttctgtcactctctatgtcaatgctcctgaaccgccccaagttctgcaggagctccagcctgtcactgtgcagtctggcaagcctgcccgcttctgtgccgtgatatccggaagaccacagcccaaaatttcctggtacaaggaagagcagctgctttccactggcttcaagtgcaaatttcttcatgatgggcaagagtacacgcttttgctaattgaagccttcccagaggatgcggcagtctatacctgtgaagccaagaatgactatggtgttgccacaacatcagcttcactctcagtggaagttccagaagttgtgtctcctgatcaggaaatgcctgtttatccacctgccatcatcaccccgcttcaggacactgtcacttctgaagggcagccagcccgttttcaatgccgggtttctggaacagatctaaaagtgtcgtggtacagcaaagacaagaaaatcaagccatctcggttctttagaatgactcaatttgaagacacttatcaactggaaattgccgaagcttatccagaagatgaaggaacttacacgtttgttgctagtaatgctgtaggccaagtatcaagcacagccaacctgagtctggaagctcctgaatcaattttgcatgagaggattgaacaagagattgagatggaaatgaaagagttttctagttcttttctgtctgccgaggaagaaggacttcatagcgccgaacttcaattatctaaaataaatgaaacacttgaacttttgtctgaatctccagtttactcaactaaatttgattccgaaaaggaaggcactggcccaattttcatcaaagaagtgtcaaatgctgatataagcatgggggatgtggctacactgtctgtaactgtcattggcatccccaaacctaaaattcagtggttctttaatggagtgctattaaccccttctgctgactacaaatttgtttttgacggtgatgatcatagcctgatcattctgttcaccaaattggaggatgagggagagtatacatgtatggccagtaatgactatggaaagacaatatgtagtgcctatctaaaaattaattccaaaggagagggtcacaaagacactgaaacagaatcagcagtggcaaaatctctggaaaagctgggaggtccttgtcctcctcacttccttaaggagttaaaaccaattcgctgtgctcaagggcttcctgccatctttgagtacacagtggttggagagcctgcccctactgttacatggttcaaagaaaacaagcagctttgcaccagtgtttattacactatcattcataaccctaatggctctggaactttcattgtcaatgaccctcagagggaagacagtggcctctatatctgtaaagcagagaatatgttgggtgagtccacctgtgcagcagagctgcttgtgcttctggaagacacagacatgactgataccccctgcaaagcaaagtccacaccagaggctcctgaggattttccacagacacccttaaagggtcccgcagttgaagcacttgactcagagcaggaaattgcaacgtttgtaaaagacaccattttgaaagctgctttaattacagaagaaaaccagcaactatcttatgagcatattgctaaagccaatgaattgagcagtcagcttcctttgggagctcaggaattgcaatccattttggagcaagacaagctcactcctgaaagcaccagggaatttctttgcatcaatggcagtattcactttcagcctctcaaggaaccatctcccaacctacagctgcagattgtacagtcccagaaaaccttctccaaagaaggtattctaatgcctgaagagcctgagacacaggcagttctatcagataccgagaaaatcttcccaagtgccatgtccatagaacaaattaattcattaacagttgagcctctgaaaactttattagctgaacctgaagggaattatccacagtcttcaatagaacctccaatgcattcttatctaacctctgtggctgaggaagtactttcaccaaaagaaaagacagtatctgacaccaacagagagcaaagagtgactcttcaaaagcaagaggcacaaagtgcgctcatcttgagtcagagcttagctgagggacacgtggagagtctccagagtcctgatgtcatgatctctcaggtaaactatgagcccctagtcccttcagaacactcatgcacagaaggaggtaaaattttgatagaaagtgcaaatccactggaaaatgcagggcaagattctgcggtcagaattgaggaaggcaagtccttaagatttccactagcacttgaagaaaagcaggtactgctcaaagaagagcattctgacaacgtggtgatgcccccagaccaaatcattgagtctaaaagagagcccgtggcaataaagaaagtgcaggaggtacagggaagggaccttctttctaaggaaagcttgctttctggtattccagaagagcagagattaaacctgaaaattcaaatctgccgggctttgcaagcagccgtggccagcgagcagccaggtcttttctctgagtggctaagaaatattgaaaaggtggaggtcgaggctgtaaacatcacccaagagcccagacacatcatgtgcatgtaccttgttacttcggcaaagtctgtaacagaagaagtaaccatcattattgaagatgttgatcctcaaatggctaacctgaaaatggaacttagggatgctttgtgtgctattatatatgaggaaatagacatcctaacagctgagggtcctagaattcagcaaggagccaaaacaagtttgcaagaagaaatggattctttttcaggttcacagaaggttgaacccattactgaaccagaagttgaatctaaatatctgatctcaactgaagaggtcagttattttaacgtgcaaagtagggttaaatatttggatgccacacctgtcactaaaggggttgcttcagctgttgtctctgacgaaaaacaagatgagagtctgaaaccatcagaggaaaaagaggagtcttcctctgaaagtggtactgaggaggttgctacagtaaagatacaggaagctgagggtggcttaatcaaagaggatggccccatgatacatacacctttagtggacactgtttctgaggaaggtgatattgtacacctcacaacatccataacaaatgctaaagaggtgaattggtattttgagaataaactggtgccttcagatgaaaagttcaagtgtttacaagatcaaaatacatatacgctagtcatcgacaaagtaaataccgaagaccatcaaggagagtatgtctgtgaggccttgaatgacagcggaaaaacagcaacttcagccaaactcactgtagtaaaaagagctgccccagtgatcaagaggaaaatcgaacccctggaagtagcactgggccacctagccaaattcacctgtgagatccaaagtgctcccaatgtccggttccagtggtttaaagctggccgagaaatttatgagagtgacaagtgttctattcgatcttcaaagtatatctccagccttgaaatcctgagaacccaggtggttgactgcggcgagtatacatgcaaagcttccaatgagtatggcagtgtcagctgtacagccacactaactgtgacagaggcatatccaccaacctttctctccagacctaagtcccttacaacttttgtgggtaaggcagccaagttcatctgcacagtgacagggactcctgtgatagaaaccatttggcagaaagatggtgctgcactctcaccttcacctaactggaggatttccgacgcagaaaacaaacacattttagaactctcaaaccttaccattcaagatagaggagtttattcttgtaaggcttctaacaagtttggagcagacatctgccaagcagagttgatcatcattgataagccacatttcattaaagaattagagcctgtgcagtccgctatcaataagaaggtccaccttgagtgccaagtagatgaagacagaaaagtcacagttacgtggagcaaagatgggcaaaaactccccccagggaaagattataagatctgttttgaagataaaatagcaacacttgagattcctttggccaaactgaaagattcaggaacctatgtctgtacagcttcaaatgaggctggaagcagctcctgctcagccacagtcactgtcagagagccaccatccttcgtgaagaaggtggatccctcttatttaatgctcccaggtgaatcagcacgcctccattgcaagctgaaaggctcacctgtgatccaggttacttggtttaaaaataacaaagaactcagtgaaagtaacacagtccgaatgtattttgtcaattctgaggctatacttgatattacggatgtaaaagttgaagacagtgggagttactcatgtgaagcagtgaatgacgtcggcagtgatagctgcagtactgaaatagttatcaaagaacctccttctttcatcaaaactcttgagcctgcagacatagtgagaggaacaaatgctctacttcagtgtgaagtctcaggcactggaccatttgaaattagctggttcaaagacaagaaacaaattcgaagtagtaaaaaatacagattgttttctcagaagtctcttgtgtgtctggagatcttttcgtttaatagtgcagatgttggtgaatatgaatgtgttgttgctaatgaagtcggcaagtgtggctgcatggcaacccacttactcaaagaacctccaacctttgtaaagaaagtagatgatttgattgcactaggaggacaaaccgttaccctgcaagctgctgtgagagggtcagagcccatttctgtcacatggatgaaaggtcaagaggtcatcagagaagacggaaaaatcaaaatgagcttttccaatggtgttgcagtcttgataatccctgatgttcagattagttttggaggcaaatacacgtgcctggctgaaaatgaagctggaagccaaacatctgttggggaattaatagttaaagaacctgccaaaatcattgagcgagcagaactgatccaggtgacagcaggagatcccgccacactggagtacacagtggcaggcacgccagaactgaagcccaaatggtacaaagatgggagacccttggtcgccagtaaaaaataccgaataagttttaaaaacaatgttgcccagctcaaattttattcagctgagctgcacgacagtggccaatacacatttgagatttccaatgaagtgggcagcagctcctgtgagactacattcactgtattagatcgagacattgctccattttttaccaaacccttgcgcaacgtggatagtgttgttaatggtacctgcagactggactgcaaaattgcaggctccctccccatgagggtgtcctggtttaaggatggcaaagaaatagctgcttctgacagatacaggatagcatttgtggaaggcacagcctctttggagatcatcagagtagacatgaatgatgcagggaatttcacttgtcgagccacaaattccgtgggaagcaaagacagcagtggagccctgattgtgcaagaaccacccagttttgtaactaaacccggctcaaaggatgttctgcctggctcagcagtctgcctgaagagcactttccaaggatctactcctctcacaatcagatggtttaagggcaacaaagagctggtttctggtggaagctgctatattaccaaagaagctttagagagttccctggaactctatttagtaaaaacctctgattcgggcacgtacacatgtaaagtcagcaatgtcgctggaggggtggaatgcagtgcaaacttgtttgtaaaagaacctgccacatttgttgaaaagttagagccatcacagctgttaaagaagggagatgccacccagctagcctgcaaagtaactggtacccctccaattaaaataacatggtttgcaaatgatagagaaattaaggagagcagcaaacacagaatgtcttttgtggagtctactgcagttctaagactgacagatgttggcatcgaagacagtggtgaatatatgtgtgaggcccaaaatgaggctggcagtgaccactgcagtagcattgtaatagtcaaagagtcaccttattttaccaaggaatttaagccaattgaagtcttaaaggagtacgatgtcatgttgctggctgaggtggcaggcactcctccctttgagatcacttggttcaaagataacacaatcctgcgaagtggtagaaagtataagactttcattcaggatcatctggttagcctgcagatcctcaagtttgtagctgcagatgctggcgaataccagtgtcgggtgaccaatgaggtgggcagcagcatctgcagtgccagggtgactttaagagaacccccatccttcataaagaagatcgagagtaccagctccctccggggaggcacagctgccttccaggccactctgaagggctccttgccaattacggtgacttggctaaaagacagcgatgaaatcactgaagacgataatataagaatgacctttgagaacaatgtggccagtttgtacctcagtggcattgaagtcaagcatgatgggaaatatgtctgtcaggccaaaaatgatgcaggaatacaaagatgttctgcattactctcagtaaaagaacctgcaacaatcaccgaggaagctgtgtctatagatgtcacccaaggagacccagccactttgcaggttaaattttcagggactaaggagattacagccaaatggtttaaagatggccaagaactgaccctgggctcaaaatataaaatcagtgtcactgatacagtctcaatactgaagattatttctacagaaaagaaagatagtggagaatatactttcgaggtccaaaatgatgttgggaggagcagctgcaaggctagaattaatgtattagatcttatcatacctccttcattcaccaaaaagctgaagaaaatggacagcattaaaggttctttcattgatttagaatgtatagtggctgggtcacatcccataagcatccagtggttcaaagatgaccaagaaatatcagctagtgaaaagtacaaattctcttttcatgacaatactgccttcttggaaatcagccagctggaaggtacagacagtgggacatacacttgttctgccacaaataaggcagggcacaaccaatgcagtgggcatctgacagtcaaagaacccccttactttgtggaaaagccacagtcacaagatgtcaatcccaacacaagggtacagttaaaggctcttgtgggtggcactgcacccatgacaataaagtggtttaaagataacaaagagttacactcaggagcagcccgctcagtttggaaggatgacacctctaccagtctagagctctttgcagccaaagctaccgattctggaacctacatttgccaactaagcaatgatgttggcacagcaaccagcaaagccactctctttgtaaaagaacctcctcaattcattaagaagcccagtccagtcttagtgctgaggaatggacagtcaacaacatttgaatgccaaataacaggcactcctaaaatccgagtgtcttggtatctagacgggaatgaaataacagccattcagaaacatggcatttccttcattgatggtttagccactttccagatttctggtgccagggtagaaaatagtgggacttatgtgtgtgaagctcgaaatgacgcaggcacggcgagctgcagcattgaactcaaagtgaaagaaccccccacctttatcagagagctgaagcctgtggaggtagtaaaatatagtgacgtggagctggagtgtgaagttacgggaacacctccgtttgaagtcacttggctgaagaataacagggaaattcgaagcagcaaaaaatacacattgaccgacagagtgtctgtgtttaacctccatataaccaagtgtgacccttcagacactggggaataccagtgcattgtatccaatgaaggcggcagctgctcatgcagtactagagttgccctgaaagaaccaccatcattcattaagaagatagaaaataccactactgttttgaaaagttctgccacctttcagagtaccgtggcaggttctcctcctatttctataacctggctaaaggatgatcagattcttgatgaagatgataatgtctatatttcatttgtggacagtgtggccacacttcaaatcagaagtgtggataatggacacagtgggagatatacctgtcaagccaagaatgagtcaggagttgagaggtgttatgctttccttttagtacaagaaccagctcaaatcgtagagaaagctaaatcagttgatgttacggagaaagatcccatgaccttggaatgtgttgtggctggaacaccagaactcaaagtgaaatggcttaaagacgggaaacaaatagttcccagtagatacttttcaatgagttttgaaaataacgtggccagttttagaattcagtcagtaatgaagcaggacagcggtcagtacactttcaaggtggaaaatgacttcggaagcagtagctgtgatgcctacttaagagtgctagatcaaaatattcctccatcattcaccaaaaaattaaccaaaatggataaagttctgggctcttctattcatatggagtgcaaggtgtctggttcacttcccattagtgctcagtggtttaaggatggaaaagaaatatctacaagtgcaaaatacagacttgtgtgccatgagagatctgtgtctctggaagttaataatctggaattagaagatactgcaaattacacatgcaaagtgtcaaatgtagcaggagatgatgcatgcagtggcatcttaactgtgaaagaaccaccaagcttcctagtgaaacctgggcgacagcaagccatacctgattctacagtggaatttaaggcaatactaaaaggaacaccaccatttaaaataaaatggtttaaggatgatgtggaacttgtctcaggtcctaaatgtttcattggcttggaagggtcgactagcttcttaaatctctactcagtggatgcttctaagactggacagtatacttgccatgttaccaatgatgttggtagcgactcttgtactacgatgttgcttgtgacagaaccaccaaagtttgtaaagaaattagaagcctccaaaattgtgaaagcaggtgactcttcacgacttgaatgcaagatagctggatccccagaaatcagagttgtgtggttccgaaatgaacatgaacttccagccagtgataagtacagaatgactttcattgactcagtggccgtcatacagatgaacaatctcagtactgaggacagtggagatttcatttgtgaggctcagaatcccgctggcagcacaagctgcagtaccaaggttatagtaaaagagccacctgtttttagcagcttccctcctatagtagaaacccttaaaaatgctgaagtcagtcttgaatgtgaactttcgggaacaccaccgtttgaggtggtatggtacaaagacaagcggcaactcagaagcagcaagaaatacaagattgcatccaaaaacttccacacaagtattcacattctcaatgtggacacttcagacatcggtgaataccactgcaaagcacagaatgaagtgggaagtgatacttgtgtttgtactgtaaaattgaaagaaccaccaagatttgtctccaaactgaacagcctcactgttgtagccggagagcctgctgaattacaagcatccatagaaggcgcccagcctatttttgtccagtggcttaaagagaaggaagaagtgattagagaaagtgaaaacatcaggattacatttgtggaaaatgttgcaactctacagtttgcaaaagcagagccagctaatgctggaaagtatatctgccaaatcaagaatgatggtggaatggaggagaacatggccacactgatggtcttagagcccgcagtcattgttgagaaggcaggaccgatgacggtgactgtaggagaaacgtgcactctggagtgtaaggtggctggcactccggaactctctgttgaatggtacaaggatggaaagctgttgaccagcagccaaaaacacaaatttagcttctacaacaaaatctcttccttaaggattctctcagttgaaaggcaagatgcaggcacatacactttccaggttcaaaataatgttgggaaaagcagctgcacagctgtggttgatgtttcagaccgagcagttcctccctctttcacacgaagactgaaaaatactggtggggtgttaggtgcttcttgcatcttggaatgcaaagtagctggatcatcacctatttcagttgcctggtttcatgagaaaaccaagattgtcagtggagcaaagtaccaaaccacattttcagataatgtctgcacattgcagttgaattctctggattcctcagatatgggcaattacacatgcgtggctgctaatgtcgctgggtctgatgaatgtcgtgcagtgctaactgtacaagaaccaccctcttttgtgaaagaacctgaacctttggaagtactaccaggcaaaaatgtaaccttcacaagcgttattagaggaacccctccattcaaagtcaactggttcagaggtgccagagaactagtgaaaggagaccggtgcaacatctattttgaagacactgtggcagaactggaattatttaatattgacatatctcagagtggggaatacacctgtgtggtttctaacaacgctggccaagcatcttgcactacccgtctctttgtgaaagaaccagctgcatttttgaagagattaagtgatcattctgtagaaccagggaagtccataattctggagagcacctacactggaacacttccaatttctgtcacttggaaaaaggatggttttaacataactacctctgaaaaatgtaacatagtcacaacagagaaaacttgtatcctggaaattctgaatagcacaaaaagagatgcagggcagtattcctgcgagattgaaaatgaggcaggaagggatgtttgtggagctctggtatctacattagaaccgccttattttgttacggaactggaacctctggaggcagcagttggagattcggtttctttacaatgccaagttgctgggacaccagaaattacagtgtcttggtacaaaggagataccaaattacggccaactcctgaatacaggacctactttacaaacaatgtggccacacttgtttttaataaagtgaacatcaatgacagtggagagtacacatgcaaagcagaaaatagtataggaactgcttcttctaagactgtgttcagaattcaagagcgccaactcccaccttcttttgcaagacaattaaaggacattgaacaaactgtggggttacctgttacactcacttgtcgattaaatggctctgcacccatccaagtgtgctggtatagagatggagtacttttaagagacgatgaaaatctacagacttcatttgtagataatgtggcaactttaaaaattttgcaaactgacttgagtcactctggccagtactcttgctcagcttccaacccacttggaacagcatcttctagtgctagactcacagcaagagaacccaagaaatctcccttctttgacatcaagcctgtatctatagatgttattgctggagaaagtgctgattttgagtgtcatgttactggtgctcaaccgatgcgaatcacttggtcaaaagataacaaggagatccgtcctggaggaaactatacaatcacatgtgtgggaaacactcctcatttgagaattcttaaagtaggcaaaggagactctggtcaatatacttgccaagcaaccaatgatgttggcaaagacatgtgctcagctcagctcagtgtaaaagaacctccaaagtttgttaagaaattagaagcttcaaaagttgcaaagcagggagaatccattcaactggaatgtaaaataagtggctccccagaaatcaaagtttcatggttccgaaatgacagcgaacttcatgaaagttggaaatacaacatgtcattcattaattctgtggcattgcttacgatcaatgaagctagtgctgaagacagcggggactacatttgtgaggctcataatggtgttggtgacgccagctgcagcacagcgttgacagtgaaagcacctcctgttttcacccagaagccttctccagtaggagctcttaaaggttctgatgtgattctccaatgtgaaatttcgggaactcccccatttgaagtagtatgggttaaagatcgaaagcaagttagaaacagcaagaaatttaaaatcacttcaaaacattttgatacaagtcttcatatccttaatcttgaagcctccgatgtcggggaatatcactgcaaagctactaatgaggtgggaagtgacacgtgttcttgctctgtcaagttcaaagaacctccacgattcgtgaaaaagctaagtgacacctcaacccttattggggatgctgttgagttacgggccatagtggagggcttccagccaatttctgttgtctggctgaaagatagaggtgaagtcatcagagagagtgaaaataccaggatttcattcattgataacattgcaaccctccagctggggagtccagaagcatctaattctggaaaatatatatgccaaatcaaaaacgatgctggaatgagagaatgctctgcagtcttgactgtactagaaccagcaagaatcatagagaagcccgaacccatgactgtcactactggaaatccttttgcattagagtgtgtagtgactggaacaccagaactctcagccaagtggttcaaagatggaagagaattgtctgcagacagcaaacatcacattacattcatcaataaagtggcttcccttaaaatcccctgtgccgaaatgagtgacaaaggattatatagctttgaagtgaaaaacagtgttggcaaaagtaactgcactgtatccgtccatgtttctgatcggattgtgcctccttccttcatccgcaagctgaaagacgtgaatgccatcctgggggcctcagttgttttggagtgccgagtctctggctcagccccgatttcagttggctggtttcaggatggaaatgagattgttagtgggcccaaatgtcagtccagcttttcggaaaacgtctgtactttgaatctgagcttgttggagccctccgacacaggcatatacacgtgtgtggctgccaatgtagctggttccgatgagtgctcagcagtcctgactgtgcaagaaccaccatcttttgaacaaacccctgattctgtggaagttttgcctggaatgagcctcacattcaccagtgtcatcagaggcacccctcctttcaaggtcaagtggtttaaaggcagcagggaactggtgcctggggagtcatgcaacatctctctggaagattttgtcacagaactggagttgtttgaggtgcagccattagaaagtggagactattcttgcctcgttacaaatgatgctggcagtgcttcctgtaccacacatctttttgtgaaagaaccagccacctttgtgaaaagattggctgatttcagtgttgagacaggaagccccatagttctcgaggccacatacactggcacacctccaatctcagtgagctggataaaggacgagtatcttatttcacaatctgagagatgcagtattactatgacagaaaaatctaccatactggaaattcttgagagcacaatagaggattatgcacagtacagctgcctgatagaaaatgaggctggtcaagatatctgtgaagctctggtgtctgtcttagaaccaccgtactttattgaacctctggaacatgtggaagcagtcattggagaacctgcaactttacagtgtaaagtggatggaactccagaaattagaatttcttggtataaagaacacacaaagctacgatcagctcctgcatataaaatgcaattcaaaaataacgttgcttccttagtaatcaacaaagtggatcacagtgatgtgggagagtattcatgcaaggcagacaacagtgtgggggcagtcgcttcttcagctgtgcttgttatcaaagagcgcaaacttccacctttctttgcaagaaaactgaaagacgttcatgagactctaggcttcccagttgcatttgaatgccgcatcaatggctcagaacctcttcaagtgtcttggtacaaggatggggttcttttgaaagatgatgctaatttgcagacatcttttgttcataatgtagcaactcttcagattttacaaactgaccagagccacatagggcagtataattgctctgcttctaatcctcttgggactgcttcatccagtgccaagctcattctctcagagcatgaagtgcctcctttctttgatctaaagcctgtatcagtagatcttgctcttggagaaagtggtacttttaaatgtcatgtaactgggactgcaccaatcaaaatcacttgggccaaagataaccgagagattcgccctggaggcaactacaagatgactttggtagaaaatactgccactctgacagttctcaaagtaggcaaaggcgatgccgggcagtacacctgctatgcaagcaacatcgctggaaaagactcttgttctgctcatctgggtgtacaagaaccacccaggttcattaagaagctagaaccttcaagaattgtgaaacaggatgaattcacaaggtatgaatgcaaaatcggtgggtctccagaaatcaaagttttatggtataaggacgagactgaaattcaagagagcagtaaattcagaatgtcattcgttgactcggtggctgtgctggaaatgcacaatctcagtgttgaagacagtggagactacacctgtgaggcccacaatgcagcaggcagtgccagcagcagcacatccttaaaagttaaagaaccacccattttccgcaaaaagcctcatcctatagagacactgaaaggagctgatgttcaccttgaatgtgagcttcagggcactcccccatttcacgtttcttggtataaagacaagagagaacttaggagcggcaagaagtacaagataatgtctgagaacttcctaaccagtatccacatcctgaatgtcgatgctgcagacattggggaatatcagtgtaaagccacaaatgatgtgggaagcgacacttgcgttggttccatcgctctcaaagcaccaccaagatttgtgaagaagctcagtgacatatctactgtcgttggtaaagaagttcagctgcagactaccattgaaggcgctgaacccatttcagtggtgtggttcaaagataagggagaaatcgttagagaaagtgacaacatatggatttcttattcagaaaacattgcaaccttacagttttcaagagtggaaccagccaatgctggaaaatacacttgtcagatcaaaaacgatgctgggatgcaagagtgcttcgccacgctatccgttctcgagcctgcaacaattgtagaaaagccagaatccataaaagttaccacgggagacacctgtaccttggagtgtacagtagctggcacccctgaactcagtactaagtggtttaaggatggaaaagagctaacaagtgacaacaaatacaaaataagcttcttcaacaaagtatccggccttaagatcatcaatgtagcaccgagtgacagtggggtatacagttttgaggtgcagaaccctgttggcaaagacagctgcacagcttcattgcaggtttcagaccgaaccgttcctccttcattcacaagaaaattgaaagagacaaatggtctatccggctcctcagttgtaatggagtgtaaagtctatgggtcacctccaatctctgtctcctggttccatgaaggaaatgagatcagtagtggaaggaaataccagaccaccctgacagataatacttgtgctttaactgtgaacatgctggaagaatcagacagtggtgactacacatgtatagctactaatatggctggttctgatgaatgtagtgctcctttgactgtgagagaaccaccatcttttgttcagaaacctgatcccatggatgttttaactgggaccaatgtaactttcacaagtatcgtaaaaggaacacctcctttcagtgttagctggttcaaaggtagcagtgaactagtaccaggtgacagatgcaacgtgtctttggaggattcagttgctgaactggagttgttcgatgtagatacatcacaaagtggagaatatacttgcatagttagcaatgaagctggcaaggcttcttgtacaacacatctctacataaaagccccagccaaatttgtgaagaggctgaatgattacagcatagagaaaggaaaacccctgatcctagagggtacattcactggaactcctcccatttcggttacctggaagaaaaatggcataaatgtaactccttctcagaggtgtaatataactacgactgaaaaatcggcaatcctggaaattccaagtagcacagtagaggatgcaggacaatacaactgctacattgaaaatgcctctggaaaagattcctgttcagcacaaatactcatactagaaccaccgtattttgtcaagcagttggagccggttaaggtgtctgttggagattctgcctctctacaatgccagcttgctggaacccctgaaattggggtatcctggtataaaggagatacaaaattgagacccactacgacttacaaaatgcattttaggaataatgttgctacactggttttcaaccaggttgatattaatgatagtggagaatatatctgcaaagctgaaaacagcgtgggagaagtttctgcatcaactttccttaccgttcaagagcaaaaacttccaccatcattttctcgacaattgagagatgttcaagaaacagttggactgccagttgtttttgattgtgccataagtggatcagaacctatctccgtgtcttggtataaagacggcaagccattgaaagacagcccaaatgtacaaacatcatttttagacaatacagccacactcaatatttttaaaactgaccggagccttgcaggccagtattcctgcacagctacaaaccctataggctctgcttcttccagtgccaggctcattctcacagaggggaagaacccacccttctttgacatccgtcttgcccctgtggatgctgtggtgggagaaagtgctgactttgagtgccacgtcacgggcacacaaccgataaaggtcagctgggccaaagacagcagagaaatacgaagtggcggaaagtaccagattagttatctggaaaacagcgcccacctgacagtcctcaaagtagacaaaggagattctggacaatatacctgctatgctgtgaatgaagtgggaaaagactcttgcacagctcagctgaatataaaagagcggctcatcccaccaagtttcactaaaagactctcagagacagtagaagaaacagaagggaattctttcaaacttgagggacgtgtggctggttcccaacctataactgttgcctggtacaaaaataatatagagatacaaccaacttctaactgtgaaataacattcaagaacaacacgttagtgctgcaagtcagaaaagcaggcatgaacgacgctggtttgtacacatgcaaagtgtccaatgatgcaggctctgctctgtgcacgtcttcaatcgtcatcaaagaacctaagaagccacctgtatttgatcagcaccttactccagtaacagtgagtgaaggagaatacgtgcagctcagctgccatgtccagggatctgagccaattaggatccagtggttgaaggctggcagggaaataaagccttcagacagatgcagcttcagctttgctagtgggacagctgtactggaactcagagatgtggctaaagcagattcgggagattatgtgtgtaaagcttcaaatgtggctggaagtgacactaccaaatcaaaagtgaccattaaagacaaaccagctgtggccccagcaaccaagaaagctgcggtagatggaagactcttttttgtgtcagaacctcagagtatcagagtcgtagaaaaaaccactgcgaccttcattgcaaaagttggaggtgacccaatcccaaatgttaaatggacaaaagggaagtggagacagctgaaccaaggaggtcgtgttttcatccaccaaaaaggcgatgaagcaaaactggagattagggacaccacaaaaactgattctgggttataccgatgcgtggcatttaacgaacatggtgaaattgaaagtaatgttaacttacaggtggatgaaaggaagaaacaagagaaaattgaaggcgatcttagagcaatgctgaaaaagactccaatcttaaagaaaggagctggagaagaagaggaaattgatatcatggaacttctcaaaaatgttgatcctaaagaatatgaaaaatatgcccgcatgtatggaatcactgacttccgaggtcttcttcaagcatttgaactgctcaagcaaagccaagaagaagagacacatagactggaaattgaggaaatagagaggtcagagagggacgaaaaggaatttgaggaacttgtatcatttattcagcaaagactgtcacagacagagcctgtcactctgatcaaggacattgaaaatcagacagttttgaaagataatgatgctgtctttgaaattgacattaaaattaattatccagaaatcaagctttcgtggtacaaaggaactgaaaaactggaacccagtgataaatttgaaataagcattgatggtgaccgacatacactcagagtcaaaaactgtcaacttaaagaccagggcaattatcgattggtttgtggtccacacatcgctagcgctaaactaactgtaattgagcctgcatgggaacggcatcttcaggatgtgactctgaaagaaggccagacttgcaccatgacatgccaattttctgtaccaaatgtaaaatctgaatggttcagaaatggcagaatccttaaaccccaaggtagacataaaacagaagtggaacacaaagtccataaattgaccattgcagatgttcgagcagaagaccagggtcagtacacctgcaaatatgaagaccttgaaacttcagcagaactcagaatcgaagctgaaccaattcagtttacaaagcgcatacagaacatcgtggtgagtgagcatcagtctgccacctttgagtgtgaagtgtcctttgatgatgccattgtaacatggtacaaaggaccaacagaactgacagagagccagaaatacaacttcaggaatgatggccgctgccattatatgaccatccacaatgtgaccccagacgatgaaggtgtctactcggtcatcgctcggctggagccaagaggtgaagcaagaagcacggcagagctgtacctaacgacgaaagaaatcaaacttgagctgaagcctcctgatattcctgactccagagttccaatcccaaccatgcctatcagagcagtgccaccagaagaaatccctcctgtggttgctcctcctatcccccttttgctaccaacacccgaagaaaagaaaccaccaccaaaacgtattgaagttaccaaaaaggctgtgaagaaagatgccaaaaaagttgttgcaaagcccaaagagatgacaccacgtgaagagattgtcaagaagcctccacctcctactaccttaattccagcaaaagctcctgaaatcattgatgtatcctctaaagctgaagaagtaaaaataatgactataaccagaaagaaagaggttcagaaagaaaaagaagctgtgtatgagaaaaagcaagcagtccacaaggagaagagagtcttcattgaatctttcgaagaaccttatgacgaactggaggtagaaccatacacagagccatttgaacaaccttattatgaagaaccagatgaagactatgaagagattaaggtagaagctaaaaaagaagttcacgaggaatgggaagaagattttgaagaagggcaagaatactatgaaagggaagaaggctatgacgaaggggaggaagagtgggaagaggcttaccaagaaagggaagtaattcaagttcaaaaggaggtctatgaagaatcacatgagagaaaagttccagccaaagtacctgaaaagaaagcaccaccacctcctaaagttataaagaagccagtaattgaaaaaattgaaaagacttctcgaagaatggaggaagaaaaagttcaagtcaccaaagtacctgaagtttcaaagaagattgttccacaaaaaccttcccggactccagtacaggaagaagttattgaagtgaaagtaccagctgtgcatacaaagaagatggttatttcagaagaaaagatgttctttgcttctcacacagaggaggaggtgtcagtcacagtccccgaggtacaaaaggaaattgttactgaagagaaaattcacgttgccgtttccaaaagggttgaaccaccacctaaagtccctgagctacctgagaaaccagctccagaagaagtggcccctgttcctatccctaaaaaagtggagcccccagcaccaaaagttcctgaggttcccaagaaacccgtgccagaggagaaaaagccagttcctgtgcctaagaaggaacctgctgctcccccaaaagtcccagaggtgccaaagaaacctgtccctgaagaaaagattcccgttcctgttgcaaagaaaaaggaagctcccccagctaaagttcctgaagtacagaagagagttgtgacagaagaaaaaataaccattgtaactcaaagagaggaatctccaccaccagcagtgccagaaataccaaagaagaaagttcctgaagaaaggaaacctgttcctcggaaggaggaagaagttccaccaccaccaaaagtgccagctctgcctaagaaacccgtcccagaggagaaagttgcagtgccagttcctgtcgctaagaaagctcctcctccccgagctgaagtctctaagaaaactgttgtagaagaaaagagatttgttgctgaagaaaaactatccttcgcagttcctcaaagagtggaagtcacgcggcacgaagtatctgcagaggaggaatggagttactcagaagaggaggaaggtgtgtccatttcagtttatagagaagaagaaagagaggaggaggaagaagcagaggttacagaatatgaagtgatggaagagcctgaggaatatgttgtggaagaaaagctgcacattatttctaagagagtggaagctgagccagctgaagtgacagagaggcaggagaagaaaattgtactgaaaccaaaaattcctgctaaaatagaggagcctccaccggctaaagttcctgaagcacctaagaaaattgtgccagaaaagaaagttcctgctccagttcctaaaaaggaaaaggtgcccccacctaaagtgccagaagagccaaagaaaccagttccagaaaaaaaggttcctccaaaagtcattaagatggaagaacctctcccagccaaagtgactgagaggcacatgcaaattacccaggaagaaaaagttcttgttgctgtaactaaaaaagaggcgcctccaaaagcaagagtgccagaggaaccgaagagagctgtcccagaagaaaaagttctgaaactcaaacctaaaagagaggaggaaccaccagctaaagtgactgaattcagaaaaagagtggttaaagaagaaaaagtatcaattgaagctccaaaaagagaacctcaacccatcaaagaagtaactataatggaagagaaagaaagggcttataccctagaagaagaagctgtttcagtacaacgggaagaagaatatgaggaatatgaagaatatgattataaagaatttgaggagtatgaaccaacagaagaatatgaccaatatgaagaatacgaggagcgggagtatgaacgatatgaagagcatgaagaatacatcacagaaccagagaagcctatccctgtaaagcctgtcccagaagaaccagttcccacaaaaccaaaggccccaccggctaaagtgctgaagaaagctgtccctgaagaaaaagtaccagtgcccattcctaagaaactcaaacctccaccacccaaagtgcctgaagaaccaaagaaagtttttgaggaaaaaatacgtatttcaattaccaaacgtgaaaaagagcaggtgactgaacccgctgctaaagtgcccatgaagcccaagagggttgtcgcagaagaaaaagtacctgtccctagaaaagaagtagcaccacctgttagagtgccagaagtgcctaaagaacttgaaccagaagaggttgcctttgaagaggaagttgtaacccatgtagaagaatatcttgtagaagaagaagaagagtacattcatgaagaagaggagttcataactgaggaagaagtggtgccagtgataccagtcaaagtgcctgaggtacccaggaaacctgttccagaagagaagaaacctgttcctgttcccaagaagaaggaagctccaccggcaaaagtgcctgaggttcctaagaagccagaggagaaagttcctgtgcttattcctaaaaaggagaagcctccgccagcaaaagttcctgaagtgcccaagaaacctgtgccagaggagaaagtaccagtaccagttcctaaaaaggtggaagctccacctgccaaagtgccagaggtacccaagaagcctgtgcctgagaagaaggtgccagttcctgctcctaagaaagtggaggctccacctgcaaaagtgccagaggtgcccaagaagctcatcccagaagaaaagaaaccaacacctgttccgaaaaaagtggaagcaccaccacccaaagtgccaaagaaacgtgaaccagttccagttcctgtagctctacctcaggaagaggaagttctatttgaagaagaaattgttcctgaagaggaagttctacctgaggaagaggaagttctacctgaggaagaggaagttctacctgaagaagaggaagttctacctgaagaagaggaaattccacctgaggaagaggaagttcctcccgaagaagaatatgtacctgaggaagaagaatttgtacctgaagaagaagtccttccagaagttaaacctaaggtgccagtacctgcaccagtgcctgaaattaagaagaaagtgacagagaagaaagtggtcattcccaagaaagaggaggctccccctgccaaagttcctgaggtgcctaagaaggtggaagaaaaacgaatcattctccctaaagaagaggaagttctaccagttgaagtgactgaggagcctgaagaagagcctatttcagaagaagaaatcccagaagaaccacctagcatagaggaagttgaagaggtggcaccacctagagtgcctgaagtgattaagaaagcagtacctgaagcacctactcctgttcctaaaaaagtggaggcaccaccagctaaagtgtcaaagaaaattcctgaggaaaaagtacctgttcctgttcagaaaaaagaggcacccccagccaaagtgcctgaagtaccaaagaaagtcccagaaaagaaagtccttgtgcctaaaaaggaagctgttcccccagctaaagggagaactgtccttgaagaaaaagtatcagttgccttccgccaagaagtagtagtaaaagaaagactagaattagaagtagtagaagcagaagtggaagaaattccggaagaagaagagttccatgaagttgaagaatattttgaagaaggcgagtttcatgaagtagaagaattcatcaaattagaacaacatagagttgaagaagaacacagagttgaaaaagttcatagggtaatagaagtttttgaggctgaagaagtggaagtatttgaaaaaccaaaagctccacctaaagggcctgagatatctgagaaaatcatccctccaaaaaaaccgcccactaaagttgttcctcgaaaagagccaccagctaaagtaccggaggtgcctaagaaaattgtggtagaagaaaaagtacgtgttcctgaagagcccagagttccaccaactaaagtgcctgatgtgctgccaccgaaggaagtggtcccagaaaagaaagtaccggtgcctcctgccaaaaagccagaagctccacctcctaaagtgcctgaggctcccaaagaagttgttcctgaaaagaaagtgccagtgcctcctcctaaaaagcctgaagtgccacccacaaaagtcccagaggtgccaaaggcagctgtcccagaaaagaaggtgcctgaagctattcctcccaaaccggaaagtcctccccctgaagtgccagaggctccgaaagaagttgttcctgaaaagaaagtgccagcggctcctcctaaaaagcctgaagtcacacctgttaaagtgcctgaggctcccaaagaagttgttcctgaaaagaaagtgccagtgcctcctcctaaaaagcctgaagtgccacccacaaaagtcccagaggtgccaaaggtagctgtcccagaaaagaaggtgcctgaagctattcctcccaaaccggaaagtcctccccctgaagtgttcgaggagcctgaggaagttgccctagaagagcctcctgctgaagttgtggaagagccagagccagcggcgcctccacaagtgaccgtaccacctaagaaacctgtcccagaaaagaaagcacctgctgtcgttgccaaaaaacctgaactaccaccagtgaaagtgcccgaggtgcccaaggaggttgttcctgaaaagaaggtgcctctggtggttcccaaaaagccagaagccccacctgctaaagtgcctgaagttccaaaagaagttgttccagaaaagaaagtagctgttcccaaaaagccagaagtcccaccagcaaaagtgccagaagtgccaaagaaacctgtcttggaagagaaaccagctgttcctgttccagaaagagcggagtctcctcccccagaagtatatgaagaacctgaggaaattgctcctgaagaggaaattgctcctgaagaggaaaagccagttcctgttgcagaagaggaggaaccagaggttccacctccagcagtgcctgaagagcccaagaagatcatcccagagaagaaagttcctgtcatcaaaaaaccagaagcaccgcctcctaaagaacctgaacctgaaaaggttattgagaagccaaaactcaaaccaagacccccacctcctccacctgctccacctaaggaagatgtgaaggagaaaatattccaacttaaagctattccaaagaagaaagttcctgaaaaacctcaggttccagaaaaagtggagcttacacctctgaaagtgcctggaggtgaaaagaaagttcgcaaattacttccggaacgtaaacctgaaccaaaggaagaagttgttctgaaaagcgttctaagaaaaagacctgaagaagaagaacctaaagtagaacctaaaaaactagaaaaagttaaaaaacctgcagtaccagaaccaccacctccaaaacctgttgaagaggttgaagtacctactgttacaaaaagggaaaggaagattcctgaaccaacaaaagtgcctgaaatcaagccagcaatacctctccctgcacctgaaccgaaaccaaagcccgaagcagaagtgaaaacaatcaaaccacctcctgtggaacctgaaccaacccccatcgctgccccagtaacagtgccagtggttggaaagaaagcagaagccaaagcacctaaggaagaggctgccaagccaaaaggtcctatcaaaggtgtacccaaaaagactccttcaccaatagaagccgaaaggagaaagttaaggccaggaagtggtggagagaaacctcctgatgaagccccgttcacctaccagctaaaggctgtgccactgaagtttgtgaaagaaatcaaagacatcatcttgacagaatcagagttcgttggctcttcagcaatctttgaatgtttggtctccccttccactgcaattacaacctggatgaaagacggtagcaatatccgtgagagtcccaagcacaggtttattgcagatggtaaagacagaaagctgcacatcattgatgttcaactttccgatgctggtgaatacacctgtgttttacgtttgggaaacaaagaaaagacctccacggctaaacttgttgtagaagaacttcctgtgcgttttgtaaaaacactggaagaggaagtcacagtggtcaaaggacagccattgtacttgagctgcgagttaaacaaagagcgtgacgtggtctggaggaaggatggcaagattgtggtggagaaacctggccgaattgtgccaggcgtcattggcttgatgcgggctctgaccatcaacgatgcagatgacacagatgctggaacatacacagttactgtggaaaacgccaacaacctggagtgttcatcttgcgtaaaagtagtagaagtcattagagattggctggtgaaacctatacgagaccagcatgtgaaacccaaggggacagctatttttgcctgtgatatagcaaaagatactccaaacattaagtggttcaaaggatatgatgaaatccctgcggaaccaaatgataagactgaaatactgagagatggaaatcatctgtacctcaaaattaagaatgctatgccagaagatattgctgagtatgcagtggaaattgaaggaaaaagataccctgcaaagctgacacttggagagcgtgaagttgaactgcttaaaccaatagaggacgttaccatttatgagaaagaaagtgcaagctttgatgcagaaatctcagaggcagacattcctggacaatggaaactgaaaggagaacttctaaggccctcacctacttgtgaaatcaaagcagaaggtggaaaacgcttcttaactttgcacaaagtcaaactggaccaagctggtgaagtcctctaccaggcccttaatgcaattacaactgccattttgacagtaaaagaaatcgaacttgactttgctgtgcccctgaaggatgtcactgttccagaaaggcgacaggctcgattcgaatgtgtcctcacccgagaggcaaatgttatatggtccaaaggacctgatataattaagtcatctgacaaatttgatatcatcgctgatggaaagaaacatattcttgttattaatgattctcaatttgatgatgaaggggtctatactgctgaggtggagggcaagaagacctcagctcggttgtttgtcacaggtataagactgaaattcatgtcacctcttgaagatcaaacagtaaaagaaggtgaaacagcaacttttgtttgtgaactttctcatgaaaaaatgcatgtagtctggttcaaaaatgatgccaaactccatacaagcagaacagtactcatctcttctgagggcaagactcacaaattggaaatgaaagaagtgacattggatgatatatctcagataaaagctcaagtcaaggagctgagctccacagcacagctgaaggtcttagaggccgatccctacttcactgtgaaattacatgacaaaactgcagtggagaaggatgagattactttgaagtgtgaagtgagcaaagatgtaccagtgaaatggttcaaagatggtgaagagattgtcccttcacccaaatattctatcaaggcagatggcctgcgccgcatcttaaaaatcaaaaaggcggaccttaaagataaaggcgaatatgtgtgtgactgtggcacagacaagaccaaggcaaatgttactgttgaggctcgactaataaaagtggaaaagcctctgtacggagtagaggtgtttgttggtgaaacagcccactttgaaattgaactttctgaacctgatgttcacggccagtggaagctgaaaggacagcctttgacagcttcccctgactgtgaaatcattgaggatggaaagaagcatattctgatccttcataactgtcagctgggtatgacaggagaggtttccttccaggctgctaatgccaaatctgcagccaatctgaaagtgaaagaattgcctcttatcttcatcacacctctcagtgatgttaaagtcttcgagaaagatgaggctaagtttgagtgtgaagtatccagggagcccaaaacattccgttggctaaaaggaacccaggaaatcacaggtgatgacagatttgagcttataaaggatggcactaagcattcaatggtgatcaagtcagctgcttttgaagatgaagcaaaatacatgtttgaagctgaagataagcacacaagtggcaaactgatcattgaaggaatccggctcaaattcctcacccctctcaaagatgtaactgccaaagagaaggaaagtgctgtatttactgtggagttatctcatgataacatccgagttaaatggttcaagaatgaccagcgcctacacaccaccaggtcggtctcaatgcaagacgaagggaaaactcattcgatcacattcaaagacctgtctattgatgacacctcccaaattagagtagaagctatggggatgagttcagaagctaaactcactgtgcttgagggagacccatattttacaggaaaacttcaagattatactggtgtagagaaagatgaagttattctacagtgtgaaattagcaaagcagatgcaccagtgaaatggtttaaggatgggaaggaaataaagccatccaaaaatgctgttattaaggcagatggcaagaaacgcatgctaatcctaaagaaagccttgaaatcagatattggacagtacacctgtgactgtgggacagataagacctcaggaaaacttgacattgaggatcgggaaattaaactggtgcgacccctgcacagtgtggaggtgatggagactgagacagcacgctttgaaaccgaaatctctgaagatgatatccacgccaactggaaactcaagggagaggccctactccaaacacctgattgtgaaattaaggaagaaggcaaaatacactcccttgttttgcacaactgtcgcctggaccagacgggtggggtggatttccaagctgccaatgttaaatctagtgcccacctccgagttaagccacgagtaattggtcttctgaggcctttaaaggatgtcaccgtgactgcaggggaaacagccaccttcgactgcgagctctcctacgaagatatcccagtggaatggtatctcaaagggaagaaactagagcccagcgataaggtggtcccacgttcagaaggaaaagttcatacacttactctgagggatgtaaagttagaagatgctggggaagtccaactaacagcaaaagatttcaaaactcacgccaacctctttgtgaaagaacccccagttgaattcactaagcctcttgaggaccagacggtcgaagagggagccactgcagtgctggagtgtgaagtctccagagaaaatgctaaggtgaaatggttcaaaaatgggacagaaatcctcaaaagcaagaagtatgaaattgttgctgatggcagggtcagaaaacttgttatacatgactgtaccccagaggatattaaaacatacacttgtgatgctaaggattttaagacttcctgtaacctgaatgtcgtgcctcctcatgtggaattcttaagaccactcaccgaccttcaagttagagaaaaagaaatggctcgatttgagtgtgaactttcccgagaaaatgctaaggttaagtggtttaaagatggtgctgaaattaaaaagggcaaaaaatatgacatcatatccaagggagcagtgcgcattcttgtcatcaacaaatgtctactggatgatgaagctgaatattcctgtgaagtaaggacagcgagaacttctggcatgctgacagttctggaagaagaagctgtctttaccaaaaatcttgccaacattgaagttagtgaaacagacactataaaactggtttgtgaagtctccaaacctggcgcagaagtgatttggtataaaggggatgaggagatcattgaaacaggaagatatgaaatactgactgaaggacggaagagaatcctggtcattcagaacgctcaccttgaggatgctggcaactacaactgtcgactcccaagctctcgaaccgatggcaaagtcaaagtacatgaactggctgctgaatttatctcaaagcctcaaaaccttgaaatacttgaaggagaaaaggctgaatttgtctgctctatatcaaaagaaagctttccagtccagtggaagagggatgataagacacttgaatctggagataaatatgacgttattgctgatggtaaaaagagggtcctagttgtgaaagatgccacattacaagatatgggcacttacgttgtcatggtaggggccgccagagcagcagctcacttgacagtcattgaaaaactcaggatcgtagttcctcttaaggacacccgggtgaaggaacaacaggaagttgtcttcaactgtgaagtcaatactgaaggtgccaaagccaaatggttcagaaatgaagaagctatatttgatagttcaaaatacatcattctccaaaaagacctagtctacaccctcagaattagagatgcacacttagatgaccaagccaactataatgtgtctttgaccaatcacagaggtgaaaatgttaaaagtgcagccaatctaatagtagaagaggaagaccttaggattgttgagcctcttaaagatattgaaacaatggagaagaaatctgtcacattctggtgcaaggtgaatcgtctcaatgtaacactgaagtggaccaaaaatggtgaagaagtgccttttgacaaccgtgtctcatacagagttgataagtacaagcacatgttaaccattaaagactgtggcttcccagatgaaggtgaatacattgtcactgctggacaagataaatctgttgctgagcttctcatcatagaagccccgacagaatttgtggaacacttggaagatcagacagtcactgagttcgatgacgctgtcttctcctgccagctctccagagagaaagccaatgtaaaatggtacagaaatgggagagaaatcaaagaaggcaaaaaatacaaatttgaaaaagatggaagtatacacagactcattataaaagattgcaggctggatgatgagtgtgaatatgcttgcggggtagaagacaggaagtctcgtgctagactttttgtggaagaaattcctgttgagatcatcaggcctccacaagatattcttgaagcccctggtgctgatgttgtctttttagcagaactcaataaagataaggtggaagtccaatggctaagaaataacatggttgttgtccagggtgataaacaccagatgatgagtgaaggaaagatacatcgactacagatttgtgatattaagccccgtgaccagggtgaatacagatttattgccaaagacaaagaagccagagctaagcttgaactggcagctgcaccaaaaatcaagacagctgaccaagaccttgtggttgatgttggcaagcctctgacaatggtggtgccatatgatgcctaccccaaagcagaagctgaatggtttaaagaaaatgaacctttatctacaaaaaccattgatactacggctgaacaaacttctttcagaattttagaagccaagaaaggagacaaagggaggtataaaattgtgcttcagaacaaacatggaaaagcagaaggattcatcaatttaaaagttattgatgttcctgggccagtacgtaacttagaagtgacagaaacatttgatggtgaagtgagccttgcttgggaagaacctttaactgatggtggaagcaaaatcataggttacgttgttgaaagacgtgacattaagagaaagacctgggttctggccacagaccgtgcagagagttgtgagtttactgtcactggtctacagaaaggaggagttgagtacctattccgtgtgagtgcaagaaacagagttggcactggtgagccagtagaaactgacaatcctgtagaagcaaggagtaaatatgatgttccaggccctcctttgaatgtaaccatcactgatgtgaatcgatttggtgtctcactgacatgggaaccaccagagtatgatggaggtgctgagatcacaaactacgtcattgaattaagagacaagacttctatcaggtgggatactgccatgactgtgagagctgaagacctgtctgcaactgttactgatgtggtagaaggacaggagtacagtttccgagtgagagcccaaaatcgaattggagttggaaaaccaagtgcagccacacccttcgtcaaagttgctgatccaattgagagaccaagtcctcctgtaaacctaacttcctcagatcagactcagtcatcagttcagctcaaatgggaacctcctctgaaagatggaggaagcccaatattaggctatataattgagcgatgcgaagaaggaaaagataattggattcgttgcaatatgaaacttgtccctgaactgacttacaaggttaccggattggaaaaaggaaataaatatttatatagagtatctgcagaaaataaagctggtgtttcagatccatctgaaattcttggtcctctcaccgctgacgatgcatttgttgaaccaacaatggatttaagtgcatttaaagatggtctggaagttattgtcccaaatcctatcacgatcctggttccaagtacaggctatccaaggccaactgcaacctggtgttttggagataaagtactagaaacaggggaccgggtgaaaatgaagaccttgtctgcctatgccgaacttgtcatttctccaagtgaacgttcagacaagggcatttatacactgaaattagaaaaccgtgtgaaaacaatttctggggaaattgatgtcaatgtaattgctcgcccaagtgcacccaaagaattgaaatttggtgatataaccaaggactcagtacatttgacttgggaaccacctgatgatgatggaggaagtccgttaactggatacgttgttgaaaaacgagaagtcagccggaaaacatggactaaagttatggactttgtgactgatctagaattcacagttcctgatcttgttcaaggaaaagagtacttatttaaagtttgtgctcgtaacaaatgtggccctggagaacctgcatatgttgatgaacctgtaaatatgtcaactcctgcaacggtacctgacccaccagagaatgttaaatggagagatcgaacagccaatagcatcttcttaacatgggatccacctaaaaatgatggtggttcacgcatcaaaggatatatagttgaaagatgtccacgtggttctgataaatgggttgcctgtggagaacctgttgcagaaacaaaaatggaagtgacaggtcttgaggaaggcaaatggtatgcctaccgcgtgaaggccttaaacaggcagggtgctagcaaaccaagcagacccacagaggaaatccaggctgtggacacacaagaggccccagaaatcttcctcgatgtgaagctccttgctggtctcactgtaaaagctgggaccaagattgaacttcctgccaccgtaaccggaaaacctgaacctaaaataacttggacaaaggctgatatgattctgaagcaggacaaaagaattaccattgaaaatgtccctaagaaatccacagtgactattgttgatagtaagagaagtgacactggcacatatatcattgaggctgtgaatgtgtgtggccgggccactgctgtggtggaagtgaacgtcttagataaacccggaccaccagctgcctttgacatcacagatgtaaccaatgagtcatgtcttctaacatggaacccaccacgcgatgatggtggatctaagatcacaaactatgttgtggagagacgagcaactgatagtgaagtgtggcacaagctctcatccaccgtcaaggatacaaacttcaaggccaccaaattaatccccaataaagagtacatcttcagagttgctgcagaaaacatgtatggtgttggtgaaccagttcaggcctctccaataacagccaaatatcagtttgatccacctggtcctccaactcgcctagaaccttctgatatcactaaagacgcagtgactctcacatggtgtgagccagatgatgatggtggcagcccaatcacaggatactgggttgaaagactggatcctgatacagataaatgggttagatgcaataagatgccagtaaaggacacaacatacagagtgaaaggtctcactaataagaaaaaatacagattccgtgtgttggctgaaaatcttgctggacctggaaaaccaagcaaatcaactgaaccaatcttaataaaggatcccatagatcctccatggccccctggaaaaccaactgtaaaagatgtaggcaaaacatcagtaaggttgaattggacaaaaccagaacatgatggaggtgcaaagattgagtcttatgtcattgaaatgctgaagactggaacagatgagtgggtcagagtggcggaaggggttcccaccactcagcacttgctcccagggctcatggaaggacaggaatactcattccgagttagagctgtgaataaggctggggaaagtgaacccagtgaacccagtgaccctgtgctttgccgggagaagctatatcctccatcaccaccacgctggcttgaagttattaatatcacaaaaaatacagcagacctaaaatggacagttcctgagaaagatggagggtcccccatcaccaactacattgtggaaaagagagacgtcaggcgaaaaggctggcaaacagtggataccactgtcaaggacaccaagtgcacagtcaccccactgactgagggctctttatatgtgttccgagttgctgcagaaaatgctataggacaaagcgactacaccgaaattgaggactctgtgctggccaaagacacctttaccactcctggaccaccctacgccctggcagtggttgatgtgacaaaacgacatgttgacctaaagtgggagccacctaaaaatgatggtggaagaccaatacagagatatgtcattgagaagaaagaaaggttaggtacccgttgggtgaaagctggaaagactgcaggacctgactgtaacttcagagtaactgatgtcatcgaaggaacagaggtccagtttcaggttcgggctgaaaatgaagctggagttggccacccaagtgaacccacagaaatcctatccattgaagatccaacaagtcctccctcaccaccccttgacctacatgtgactgatgctgggagaaaacacattgccattgcttggaagcctccagagaaaaatggtggaagtcctatcataggataccatgttgaaatgtgtccagtaggcactgagaaatggatgagagttaattctcgcccaataaaggacttgaaattcaaggttgaagaaggtgttgttcctgacaaagaatatgtcctgagagtgagagcagtcaatgctattggtgtcagcgagccatctgaaatctctgaaaatgtggttgccaaagacccagactgcaagccaacaattgacctggagactcatgacattattgttattgaaggtgaaaagttaagcattcctgttcccttcagagctgtcccagttccaactgttagttggcataaagatggcaaagaagttaaagcaagtgatagattaacaatgaagaatgatcacatctctgcacaccttgaagttcccaagagtgtccgtgcagatgccggaatttataccattacactggagaataagctcggctcagcaacagcctcaatcaatgtcaaagtcataggcctacctggaccatgcaaagatattaaagcaagtgacattaccaagagttcttgtaagttaacttgggaacctccagaatttgatggtggaaccccaattcttcattatgtcctggagcgcagagaagctgggaggagaacatatataccagtcatgtctggtgagaacaaactgtcatggactgtgaaggatctcataccaaatggtgaatacttcttccgtgttaaagcagtcaacaaggttggtggaggagaatatattgaactgaaaaatccagtcattgctcaagatccaaagcaaccccctgatccacctgtagatgtagaggttcataatcctacagcggaggcaatgactattacatggaagccacctttgtatgatggagggagcaagataatgggctacatcatagagaagattgctaagggtgaagaaaggtggaagagatgcaatgaacacctggtaccaatcctgacctatacagcaaaaggacttgaagaggggaaagagtaccaattccgtgtgcgagcagagaacgccgcgggtattagtgaaccttctcgggctactcctccaaccaaagctgtagatcccattgatgcccccaaagtcattctgagaacaagcctagaagtgaaacgaggtgatgaaatagcacttgatgcaagtatttctggatcaccttacccaactattacatggataaaggatgaaaatgttattgtaccagaggaaattaagaagcgtgcagcacccttggttaggagaaggaagggtgaagttcaagaagaagaaccatttgtcctgcctctgacacagcgtttgagtattgacaacagcaaaaagggagaatctcagctacgcgtccgagattctctccgacctgaccatggtctgtatatgatcaaagttgaaaatgaccacggtattgcaaaagctccttgtactgtcagtgtgttagatacaccgggaccaccaatcaactttgtatttgaagatatcagaaagacctcagtcctttgtaaatgggaaccaccccttgatgatggtggcagtgaaatcataaactacactttggaaaagaaagacaagacaaaacccgactcagaatggattgttgtcacttcaacacttagacattgcaaatattcagtaacaaaactgattgaaggaaaagagtacctcttccgtgtaagagctgaaaacagatttgggccaggtccaccatgtgtttcaaagccacttgtggctaaagatccatttggaccacctgatgcaccagataagcccattgtggaagatgttaccagcaacagtatgctagtgaaatggaatgaaccaaaagataatggaagccccattttgggttactggcttgaaaaacgtgaagttaacagtacacattggtctcgtgtcaacaaaagccttctgaatgccttgaaagccaatgtagatggcttattagaaggactcacctatgtcttcagagtatgtgctgaaaatgcagctggacctggaaagttcagtccaccttcagatcccaaaacagcacatgatccaatctctcctcctgggccacctatcccaagagtcactgacacaagctctacaactattgaactagaatgggaacccccagctttcaatggtggtggggaaattgttggctattttgttgataagcagttggttggcacaaatgaatggtcacgctgcacagagaagatgatcaaggtccgtcagtacaccgtcaaagaaatccgagagggtgctgattacaaacttcgggtgagtgctgtcaatgccgcaggggaaggaccgcctggagaaacacaacctgttactgtggctgaaccacaagagcctccagctgtggaactggatgtttctgtcaagggtggaatacaaataatggctgggaagactcttagaattccagctgtggtgactggtcgccctgtacctacaaaagtatggaccaaagaagaaggggagctggataaagaccgtgttgtaatagacaacgttggaaccaaatctgaactaattatcaaggatgcactgcgaaaagaccatggcagatatgtgattacagctacaaatagctgtggttccaaatttgcagcagccagggtagaagtttttgatgtccctggtccagttcttgacttaaaacctgttgtaacaaacagaaaaatgtgtctacttaactggtctgatccagaagatgatggaggaagtgaaataacaggctttatcattgaaagaaaagatgccaagatgcatacttggagacaaccaatagagactgagagatctaaatgtgacatcacaggtctgcttgagggacaagaatataagttccgtgttattgccaagaacaagtttggctgtggccctcctgttgaaataggaccaattcttgcagttgatccactaggtcctccaacatctccagagaggctcacatacactgaaaggacaaagtccactatcacacttgactggaaagagccccgcagtaatggtggcagtcccatccaaggatatatcattgaaaaacggcgtcatgacaaacctgactttgaaagagttaacaagcgactctgcccaaccacatcttttctggttgaaaatcttgatgaacaccaaatgtatgagttccgtgtcaaagctgtcaatgaaattggtgaaagtgaaccatccctacctcttaatgtagtcatacaagatgatgaagtgcctccaactattaagttgcgtctgagtgttcgaggagacactatcaaagttaaggcaggagagcctgtccacatccctgcagatgtgacaggccttccaatgcctaagattgaatggtccaaaaatgaaactgtaattgaaaaacccactgatgcacttcagataaccaaggaagaggtatcccgaagtgaggcaaaaactgagcttagcattcccaaagcggtccgggaggacaaaggcacttacacagttactgcttccaatcgccttggctcagtgttccgaaatgttcacgttgaagtatatgaccgcccatccccaccaagaaatcttgctgttactgacattaaagctgaatcttgctacttgacatgggatgcccctcttgataatggtggcagtgaaatcacccattatgttattgacaaacgtgatgcaagtaggaagaaagcagaatgggaggaagtcaccaacactgctgtagagaaaagatatgggatctggaaacttatccccaatggtcagtatgagttccgagtcagggcagtgaataaatatggaatcagtgatgagtgcaaatcagataaagtagtcattcaagatccttatcgccttcctggacctccaggaaaaccaaaagttttggcacgcaccaaaggatcaatgctagtgagctggactcctcctttggacaatggtggctctccaattactggctactggctggagaaaagagaagagggaagtccttattggtcacgtgttagccgagcaccaataaccaaagtgggattgaaaggcgtggaatttaatgttcctcgtttgcttgaaggcgttaaataccagttcagagccatggcaataaatgctgcaggaattggtcctcccagtgaaccatcagatccagaggttgcaggagatcccatatttccaccggggccaccttcttgcccagaagttaaagataaaacgaagtcaagcatctcactaggatggaaacctccagccaaagatggtggcagcccaatcaaaggatacattgtagaaatgcaagaagaaggtactactgactggaaaagagtaaatgaaccagacaaacttataactacctgtgaatgtgtggtgcctaatctgaaagagctcaggaagtacagattcagagtgaaagctgtcaatgaagctggtgaatctgaaccaagtgatacaactggggagatccctgccactgatattcaagaggaaccagaagttttcattgacattggagcacaggactgtctggtttgtaaagctggctcacagattaggattcctgctgtcatcaagggacgcccaacaccaaaatcatcttgggaatttgatggaaaggcaaagaaagcaatgaaggatggagttcatgacatacccgaagatgcacagctggagactgctgaaaactcctcagtaattattattccggagtgtaaacgatctcatacaggcaaatacagcatcacagccaagaataaagcaggacaaaagactgcaaattgcagagttaaagtcatggatgtaccaggcccacccaaagatctgaaagtcagtgatatcacaaggggtagttgcagactttcatggaagatgccagacgacgatggaggagacaggatcaaaggctatgttattgagaagaggactattgatggaaaagcctggaccaaagtcaatccagactgtggaagcaccacatttgtagtgcctgatctcctctctgaacagcaatatttcttccgtgtgcgagcagaaaaccgttttggtattggcccacctgtggaaaccattcagaggaccactgccagagatccgatatatcctcctgatcctcctattaaactcaagattggcctcatcacaaagaacacagtgcatctgtcatggaaacccccgaagaatgatgggggctcccctgttacccactatattgttgagtgccttgcatgggaccctactgggacaaagaaagaagcctggaggcagtgcaataagcgtgatgtggaagaactgcaatttactgttgaagacctagtagaaggtggggaatatgaattccgagtcaaagctgtcaatgctgcaggagtcagcaagccttcagccactgttgggccctgtgactgtcaaagaccagacatgccaccatcaattgatctaaaagaattcatggaggttgaagaaggaaccaatgttaacattgtggccaaaattaaaggtgtgccattcccgacactaacctggtttaaagctcctccaaagaagcctgataacaaagaacctgttctctatgacacccatgtcaacaaactggtggtagatgatacttgcactttagttattccgcagtctcgcaggagtgacactggcttatataccatcacagctgtaaataatctgggaacagcatcaaaggagatgagactgaatgtcctgggtcgtcctggccctccagtgggacccataaaatttgaatctgtttcagcagatcaaatgacactatcttggtttccacctaaagatgatggtgggtctaagattacaaactatgtaattgagaaaagagaagctaacaggaagacatgggtccatgtctccagtgaacctaaggagtgcacgtacacgattcccaaattgctagaaggccatgaatatgtattccgaatcatggcccagaataaatatggcattggagaacctcttgacagtgaacctgaaacagcaagaaacctcttctctgtccctggagcaccagataaaccaacagttagcagcgtgactcgtaactccatgactgtcaactgggaagagccagaatatgatggaggctctcctgtgacagggtactggctggaaatgaaagacaccacttcaaagagatggaagagagttaaccgagatcctatcaaagccatgactttgggtgtttcttataaagtgactggtcttattgaaggttccgactatcaattccgggtatatgcaatcaatgctgctggcgtgggtccagcaagtctgccatcagacccagcgactgctagagatccaattgcccctcctggtcctccatttcccaaagtgacagattggactaaatcatctgcagatctggagtggtctcccccactaaaagatggtggatccaaagtaactggatacatcgttgaatataaagaagaaggaaaagaagaatgggaaaagggtaaagataaagaagtgagaggaacaaagctcgttgtgacaggattaaaggaaggagcattctacaaatttagagttagtgcagtcaacattgctggcattggagaacctggagaggtcacagatgtcattgaaatgaaggacagacttgtttcacctgaccttcagctagatgccagtgtcagagatagaattgttgtccatgctggaggggtgatccgaatcattgcctatgtgtctggaaagcctcctccaaccgtcacctggaacatgaatgaaagaaccttacctcaagaagccaccattgagaccacagccattagctcatccatggtcatcaagaactgccagaggagccatcaaggcgtctattctcttcttgccaaaaatgaagccggagaaagaaagaagacaattattgttgatgtattagatgttccaggtcccgttggaacaccattcctagctcacaacctaaccaatgagtcctgcaaactgacatggttttctccagaagatgatggaggctctccaatcaccaattatgtcattgaaaagcgtgaatctgaccgcagagcatggaccccagtgacatatacagttacccgacaaaatgctactgtccagggtctcattcaaggaaaagcctactttttccgaattgcggctgaaaatagtattggcatgggtccatttgttgagacatcagaggcacttgttatcagagagccaataactgtaccagagcgtcctgaagacctggaagtcaaagaagttactaaaaatactgtaactttgacttggaatcctcctaagtatgatggtgggtcagaaattattaactatgtcctagaaagtcggctcattgggactgagaagttccacaaagttacaaatgacaacttgcttagcagaaaatacactgttaaaggcttaaaagaaggtgatacctatgagtaccgtgtcagtgctgtcaacattgttggacaaggcaaaccatcattttgcaccaaaccaattacttgcaaggatgagctggcacccccaacgcttcacctcgacttcagagataagctcacgattcgagttggtgaagcttttgccctcactggccgttactcaggcaaaccaaagcctaaggtttcctggttcaaagatgaagctgatgtgctggaagatgatcgcactcatataaagactacaccagcaacacttgctttagagaagatcaaggccaaacgttcagattccggcaaatactgtgtggttgtggagaacagtacaggctctaggaaaggtttctgtcaagttaatgttgttgaccgtcctggaccaccagtaggaccagttagttttgatgaggtgaccaaagattacatggttatctcttggaagcctcctttagatgatggaggcagtaaaatcaccaattatattattgagaagaaggaagtgggtaaagacgtctggatgccagtgacatctgcaagtgctaaaacaacatgcaaagtttctaaactacttgaaggaaaagattatattttccggatacatgctgaaaatctgtatggaataagtgatcctctggtgtctgattcaatgaaagccaaagatcgtttcagggttcctgatgcacctgatcagccaattgttacagaagttaccaaagactctgcattagtaacctggaataagccacatgatggaggaaaacccatcacaaactacatcctggaaaagagagaaactatgtctaaacgatgggctagagttaccaaagatcctattcatccatacactaaatttagggttcctgatcttctagaaggatgtcagtatgaattccgggtttctgcagaaaatgaaattggtattggagatccaagcccaccatccaaaccagtctttgctaaagatccaattgctaaaccaagtccacctgttaatcctgaagcaatagatacaacatgcaattcagtcgatctaacttggcagccaccacgtcatgatggtgggagcaagattctgggttatattgttgagtaccagaaagttggagatgaagagtggagaagagccaatcacacccctgagtcatgtcctgaaactaaatataaagtcaccggtcttcgggacggtcaaacctataagtttagagtgttagcagtcaatgcagctggtgaatcagatccagctcatgttccggagccagtcctagtaaaagacaggcttgaaccccctgagttgattcttgatgccaacatggcaagagaacaacacattaaagttggtgatactctaagacttagtgccatcatcaaaggagtgccattcccaaaagtaacttggaaaaaagaagacagagatgctccaactaaagcaagaattgatgtgactccagttggtagcaagcttgaaattcgtaatgctgcccatgaagatggtggaatttattctttaacagtggagaatccagctggttcaaaaactgtctcagtaaaagtacttgtattagataaacctgggccacctagagatctggaagtcagtgaaattaggaaagattcatgttaccttacttggaaagaaccactggatgatggtggttctgttattaccaattatgtggttgagaggagagatgttgccagcgcccagtggtcacctctctcagctacatcaaagaaaaagagtcacttcgctaagcatctgaatgaaggcaaccagtacctcttccgagtagctgcggagaaccagtatggacgtggtccttttgttgaaacaccaaaaccaatcaaggctttggatcctctccatcccccagggccacccaaggacctgcaccatgtagatgttgacaagactgaagtctccctagtctggaataagccggatcgtgatggtggttctccaatcactggatatttggtagaatatcaagaagaaggcacccaggactggattaaatttaagactgtgacaaacttagagtgtgtggttactggactacaacaaggaaagacctatagattccgtgtaaaagctgaaaacattgtgggtcttggtctccctgacacaactatcccgatagaatgtcaagaaaaactagtgcctccatccgtggagctagatgtgaaattaattgaaggtcttgtggtaaaggctggaaccacagtcagattccctgctattataagaggtgtgcctgttcctactgcaaagtggacaaccgatgggagtgagattaaaaccgatgagcactacacagttgaaacagacaacttctcatcagtacttaccattaagaactgcttaaggagagacactggggaatatcaaatcacagtttccaatgcagccggtagcaaaacagtagccgtacatcttactgttcttgatgttcctgggccaccaacaggtcctattaatattctggatgttactcctgaacacatgactatctcatggcagccacctaaggatgatggaggaagccctgtgataaattatattgttgagaaacaagatacaaggaaagacacgtggggtgttgtctcttccggaagcagtaagacaaagctgaaaatcccacatctgcagaagggctgtgaatatgttttccgagttagagcagagaataagataggtgttggtcctccccttgactccacacctactgttgctaagcataaatttagtcctccgtctcctcctggtaaaccagtggttactgacattactgaaaatgcagcaacagtgtcttggaccctgccaaaatctgatggtggcagtccaataactggctactatatggaacgtcgagaagtaactggcaaatgggtgagggtcaacaaaacacctatcgctgacctgaagttcagagtgactggactctatgaaggaaatacatatgagtttagagtttttgctgaaaatcttgcaggactaagcaaaccatccccaagttctgatccaataaaagcttgccggcccatcaaaccacctggaccacctattaatcctaaactgaaagacaagagcagagaaacagctgatttggtgtggacaaagcctctcagtgatggtggtagccccattctaggatatgtagtggaatgtcagaaacctggcacggcacaatggaacaggattaataaagatgaactcattaggcaatgtgcctttagggtacctggactaattgaaggaaatgagtacagattccgtataaaggcagctaatattgtaggagagggtgagccaagagaactagcagaatctgtgattgcaaaagatatccttcatcctccagaagtagaacttgatgttacttgtcgtgatgttattaccgtgagagtaggccaaactatccgcattctagctcgagtcaaaggcagacctgaaccagacataacttggactaaggaaggcaaagtattggtccgagaaaagagggtggaccttattcaggatctacctcgtgttgagttacaaattaaagaagctgttagagctgatcatggcaagtatatcatctcagctaagaacagcagtggacatgcccaaggttcagccatcgttaacgtccttgacagacctgggccttgccagaatttgaaggttaccaatgtaaccaaagagaactgtacaatttcttgggaaaacccactagataatggtggctcagaaataacaaacttcatagtagaatatcgcaaaccaaaccagaaaggctggtcaattgttgcatcagatgtcactaaacgattaatcaaggccaaccttttagccaacaatgaatactatttccgagtttgtgcagagaataaagtaggtgttgggccaaccatcgaaacaaaaactcccattctggctattaaccctattgacagaccaggtgagcctgaaaaccttcacattgcagataaaggaaagacatttgtctatctaaagtggcggaggcctgactatgatggtggcagtccaaatctgtcatatcatgttgagagaaggcttaagggctccgatgactgggaaagagtgcataaaggaagcattaaagaaactcactacatggttgacagatgtgttgaaaaccagatttatgagttcagagtgcaaacaaagaatgaaggtggggaaagtgactgggtgaagacagaggaagttgttgtgaaagaagacttacaaaaaccagtacttgatctgaaattaagtggggtcctaactgtcaaagcaggggacaccattaggcttgaggcaggggttagaggcaaaccattcccagaagttgcatggaccaaggacaaagacgctacagacttaacaagatcaccaagggtcaagattgatacccgtgctgattcatctaaattttctcttactaaagcaaagcgaagtgatgggggtaaatatgtagttacggcaactaacacggctggcagttttgtggcctatgccactgtcaatgttttagataagcctggtcctgtgagaaatctgaaaattgttgatgtgtccagtgataggtgtactgtttgctgggatccaccagaagatgatggtggctgtgaaatccaaaattatattctagaaaaatgtgagacaaagcgaatggtttggtctacctattctgctactgtcttgacacctggtactacagtaacacgtctcatagaaggaaatgaatatattttcagagtccgtgcagaaaataaaataggcacagggcctccaacagaaagtaaaccagtcatagccaaaaccaagtatgataaacctggtcgccctgatcccccagaagtcactaaagtaagcaaagaagagatgactgtggtttggaatccacctgaatatgatggtggaaagtctataactggatactttttggagaaaaaggaaaagcattcaacacgatgggtccctgtcaacaagagtgcaatccctgagagacgtatgaaagtacagaatctcctcccagaccatgaatatcagttccgtgtcaaggcagaaaatgaaattggaattggagaaccaagcttgccttcaagaccggtggtggcaaaagaccccatagagccacctggtccaccaaccaatttcagagtggttgatacaaccaaacattccataactcttgggtggggaaaaccagtctatgatggtggtgcaccgatcattggatatgttgtggaaatgagaccaaaaatagcagatgcgtctcctgatgaaggctggaaacggtgtaatgctgcagcacagcttgtacgcaaggaattcactgttaccagcttggatgaaaaccaggaatatgagttcagggtgtgtgcccaaaaccaagttggtattgggcgccctgcagagctaaaggaagctatcaaacctaaagaaatactagaacctccggagattgatttggatgccagcatgaggaaactggtcatagtgagagcaggatgccctattcgtctctttgctatagtgagaggacgaccagcccctaaagtcacttggcgaaaagttggcattgataatgtggtcagaaaaggacaagttgatctggttgacactatggccttccttgtcatccccaattctacccgtgatgactcaggaaaatattccttaacacttgtgaacccagcaggagaaaaggctgtattcgtaaatgtcagagtattagacactcctgggcctgtgtctgatttaaaagtttcagatgtcactaaaacatcatgccatgtgtcctgggcccctcctgaaaacgacggtgggagccaagtgacacattatatcgtggagaaacgtgaggcagacagaaagacatggtcgaccgttaccccagaagttaagaaaacaagcttccatgtaaccaatcttgtccctgggaatgagtattacttcagagtaactgctgtcaacgaatatggccctggcgtcccaacagatgtcccaaaaccagtgcttgcatcagatcctctaagtgagccggatcccccaaggaaattagaagtgactgaaatgaccaagaacagtgccaccttagcctggttacctcccctacgtgatggaggtgctaaaatcgatggctacatcactagttacagagaagaagagcagcctgcagatcgctggacagagtactcagtggtaaaagatctgagccttgttgtcactggcctaaaggaaggaaagaaatacaaatttagagtagcggccagaaatgctgttggagtcagtttgccaagagaagctgaaggagtgtatgaagccaaagaacaactgttgccaccaaagatccttatgccagagcaaataactatcaaagctgggaaaaaactccgaattgaagcccatgtgtatggaaagcctcatcccacctgtaaatggaaaaaaggagaagatgaagttgtcacatccagccacctggcagtgcataaagcagacagctcttcaattctgatcataaaagatgtgactaggaaagacagtggttactacagcctcacagcagagaacagttctgggacagacactcagaaaatcaaagttgtagtcatggatgcccccggcccccctcagcctccatttgacatttctgatatagacgctgatgcttgctccctgtcatggcacatccctctggaggacggaggcagtaacatcaccaattatatagtggagaagtgtgatgtaagccgaggtgactgggtcacggctctagcttcagtcacaaaaacttcctgcagggttggaaagctgatcccaggccaggagtacatcttccgggtccgtgctgaaaaccgatttggcatttcagagcctctcacatctccaaagatggttgcgcagttcccatttggtgttcctagtgaaccaaagaatgcacgagtcaccaaagtcaacaaggactgtatttttgttgcttgggacagaccagatagtgatggagggagccccattattggttatctgattgaacgcaaggaaagaaacagtttgctgtgggtgaaagccaatgatactcttgtccggtcaactgaatatccttgtgctggccttgtagaaggtcttgagtattcattcagaatctatgccctaaacaaagctggatccagcccacccagcaaacccacagaatatgtaactgcaagaatgccagttgatcctcctgggaaacctgaggttattgatgtcaccaagagtactgtatctctgatctgggctcgtccaaagcatgatggaggcagtaaaattattggctatttcgtagaagcttgcaaacttcctggtgataaatgggtacggtgcaatactgcacctcaccagattccccaggaagagtacacagctactggcctagaagagaaagctcagtatcaatttagagctattgccaggaccgcggtaaacattagcccaccttctgaaccttctgatccagtgactatcctcgcagaaaatgtccctcccaggatagacctgagtgtggctatgaaatctttgcttactgtgaaagctggaactaatgtctgcttggatgctactgtttttggtaaaccgatgccaacagtttcttggaaaaaagatggcacactgctaaaaccagcagaaggcataaagatggccatgcagcggaatctgtgcaccttggagctattcagcgtgaaccggaaggactcaggagactataccattactgctgaaaattcaagtggttctaaatcagccaccattaagcttaaagtgttagataaaccgggtcctccagcatctgttaaaatcaacaaaatgtattcagatcgtgctatgctttcttgggaaccgcctcttgaagatggaggctcagaaatcaccaactatattgttgacaaacgtgaaacaagcaggcccaactgggctcaagtctctgcaactgtgcctatcaccagctgcagcgtggagaaacttatagagggccatgagtatcagttccgtatttgtgctgaaaataaatatggagtaggcgatccagtcttcactgaaccagcaattgccaaaaacccatatgacccaccaggacgctgtgatcctcctgttattagcaacataaccaaagatcacatgacagtcagctggaagccaccagcagatgatgggggctcacccatcactggctatttgcttgaaaagcgggaaacccaggctgttaactggactaaggtcaacagaaaacctattatagaaagaacattaaaagcaacaggtcttcaagaaggtaccgaatatgagttccgtgttacagctataaataaagctggaccaggcaaacccagtgacgcatccaaggccgcttatgctcgggaccctcagtatcctcctgcgccaccggctttccctaaagtatatgatacaactcgcagctctgtgagtctatcttggggcaagccagcctatgacggcggcagccctatcattggttatctcgttgaagtaaaacgggctgactccgataactgggtgaggtgcaacttaccacagaatctacagaaaacccgctttgaggttactggcctgatggaagacacacaatatcaattccgtgtgtatgccgttaataagattggatacagtgaccccagtgatgtgccagataaacactatcccaaggacatcttaattccacctgagggagaacttgatgcggacttaaggaagacactcatattacgtgctggagttactatgagactatatgtaccagtaaaaggacgcccacctccaaagattacttggtctaaaccaaatgtcaatctaagagacaggattggactggacataaagtcaactgactttgacactttcttgcgctgtgaaaatgtgaacaaatatgatgcaggaaaatatatcttaaccctggagaacagctgtggtaaaaaggaatataccattgttgtgaaagtgcttgatactcctgggccacctgtcaatgtgactgttaaggaaatatccaaagactctgcttatgttacctgggagcctcccattattgatggcggaagccccatcataaactatgtggtacaaaaacgtgatgcagagaggaaatcctggtctacagtgacaactgagtgctccaaaacaagcttcagagtagctaatttggaggagggaaaatcctacttcttccgagtgtttgctgaaaatgagtatggcattggtgatcccggtgaaactcgtgatgctgtcaaagcttcccaaactcctggaccagttgtggacctgaaagtgaggtctgtatctaagtcatcctgtagcattggctggaaaaagcctcacagtgatggtggaagtcggattattggatatgtagttgatttcctgactgaagaaaataagtggcaacgagttatgaaatccttaagcctacagtactctgcaaaagatttgactgaagggaaggaatataccttcagagtgagtgctgagaatgaaaatggagaaggaaccccaagcgaaatcactgttgtggcaagggatgatgttgtggctcctgatcttgacttaaagggtctacctgatttgtgctacttggctaaagaaaacagcaacttccggcttaagatccccataaaaggcaagccagctccatcagtctcctggaagaaaggggaagatcctctagcaactgacactagagtcagtgttgagtcatctgcggttaacacaactcttatagtgtacgattgccaaaaatctgatgctggaaaatacacaatcacacttaagaatgttgctggcaccaaggaaggaactatctccataaaggttgttggcaagcctggcatccccactggaccaatcaaatttgatgaagtcacagcagaagccatgaccttaaagtgggctcctccaaaggatgatggaggttctgaaatcaccaactatatcctagagaagagggattctgtgaacaacaagtgggtgacgtgcgcctcagctgtccagaaaaccacctttagagtaaccagacttcatgagggcatggaatataccttcagggtcagtgccgaaaataaatatggtgtaggggaaggcctgaaatcggagccaattgttgcgagacatccatttgatgtgcctgatgctcccccacctcccaatattgtggatgtcagacacgattcagtatctctaacttggactgaccccaagaaaactggtggttctccaattacagggtatcatctcgagttcaaggaaagaaacagccttttgtggaagagagctaacaagactccgataaggatgagagactttaaagtgacaggattaactgaaggtcttgaatatgaattccgagttatggcaatcaatttagcaggtgtgggcaagccaagcctaccatcagagcctgttgtggcactggacccaattgatcctcctggaaaacctgaggttattaacataacaaggaattcagtgactctcatttggactgaacctaaatatgacggtggtcataagttaactggatatatagtggagaagcgagatctaccttcgaagtcttggatgaaagccaaccatgttaatgtcccagaatgtgcctttactgtaactgaccttgttgagggtggaaaatatgaattcagaattagagcaaagaatacagcaggtgctatcagtgctccatcagaaagtacagaaaccattatttgcaaggatgaatacgaggcaccaacaattgtccttgatcccacaataaaagatgggctaacaattaaagcaggggataccattgttttgaatgccattagcattcttggcaaaccccttccaaaatcaagttggtccaaggcaggaaaagacattagaccatcagatatcactcagataacttcaaccccaacatcttccatgcttactatcaagtatgccactagaaaagatgcgggtgaatataccatcactgctaccaatccttttggcacgaaggtggaacatgtgaaggtaacagtccttgatgtacctggtcccccaggtcctgttgaaatcagtaatgtttctgctgaaaaagcaacacttacatggacacctcccttggaagatggcggctcaccaattaagtcctatatacttgaaaagagagaaaccagccgacttttgtggacagtggtttctgaagatattcagtcttgcaggcatgtggcaaccaaacttatccaaggaaatgagtacatcttccgggtctcagctgtaaaccactatggcaaaggagaacctgtacagtctgaacctgtcaaaatggtagacagatttggtccccctggccctcctgaaaaaccagaggtatcaaatgtcactaagaacactgccactgtcagctggaaaaggccagtggatgatggtggcagcgaaattacaggatatcatgtagaaaggagagaaaagaaaagcctgcgatgggtgagagcaataaaaacaccagtttccgatctcaggtgcaaagtaacaggactgcaagaaggaagcacctacgaattccgtgtcagtgcagaaaacagagcaggaattggtccacccagtgaggcttcagattctgttctgatgaaagatgcagcatatcctccaggaccaccttcaaatccgcatgtcactgatactaccaagaaatctgcttctttggcatggggcaagcctcattatgatggtggacttgaaatcactggctatgtcgtggagcatcaaaaagtaggagacgaggcctggataaaagataccacaggaaccgccctcagaatcactcagttcgttgttcctgatcttcagactaaagaaaaatacaacttcagaatcagtgccatcaacgatgcaggtgttggggagccagcggtgattccagatgttgaaatcgtagaacgggagatggctcctgattttgaactagatgccgagcttcgaagaacacttgttgttagagcaggactcagtattaggatatttgtgccaattaaaggtcgtcctgctcctgaagtgacatggaccaaagataacatcaacctgaaaaaccgagccaacattgaaaatacggaatcatttactcttctgattatcccagaatgtaacagatatgataccggtaaatttgtcatgaccattgaaaacccggctgggaagaaaagtggctttgtgaacgtcagagtcttggacacgccaggcccagtcctcaacctgcggcctacagacatcacaaaggacagtgtcaccctgcactgggacctccctctgatagatggaggctcacgtataacaaactacattgtagagaaacgtgaagcaacacggaaatcttattccacagccaccactaagtgccataaatgcacatataaagttaccggcttgtctgaagggtgtgaatatttcttcagagtgatggcagagaatgaatatggaattggtgagccaacagaaactacagagcccgtaaaagcctctgaagcaccatctccaccagacagccttaacatcatggacataactaagagcaccgtcagcctggcatggcctaagcccaaacacgatggtggcagcaagatcactggctatgtgattgaagcccaaagaaaaggctctgaccagtggacccacatcacaaccgtgaaagggttagaatgtgttgtgaggaatctaactgaaggagaggaatataccttccaagtgatggcagtgaacagcgcggggagaagtgcccctagagaaagcagacccgtcattgtcaaggagcagacaatgcttccagagctggatctccgtggcatctatcagaaactggtcattgccaaagctggtgacaacatcaaagttgaaattccagtgctcggtcgaccgaagcccacagtgacatggaaaaaaggagaccaaattcttaaacagacacagagagttaattttgaaaccacagcgacttcaaccattttaaatatcaatgagtgtgtcagaagtgatagtgggccctatccattaacagcaaggaacattgtaggagaggttggtgatgtcatcaccattcaagtccatgatatcccagggccacctactggaccaatcaaatttgatgaagtttcatctgattttgtaaccttctcttgggacccacctgagaacgatggtggtgtaccaataagcaactatgtagtggaaatgcggcagactgacagtactacctgggttgagttagcaaccaccgttatacgtactacctataaagccacccgccttactactggattagagtatcagttccgtgtaaaagctcagaatagatatggagttggaccaggcatcacatcagcatgcatagttgccaactatccatttaaggttcctggacctcctggtacccctcaggtaactgcagttaccaaggattcaatgacaattagctggcatgagccactttctgatggtggaagccccattttaggatatcatgttgaaagaaaagaacgaaatggtattctctggcagactgtgagcaaagctttagtaccaggcaacattttcaaatcaagtggacttacagatggtattgcttatgagttccgggtgattgcagaaaacatggcaggcaaaagtaagccaagcaagccatcagaacctatgttggctctggatcccattgacccacctggaaaaccagtacctctaaatattacaagacacacagtaacacttaaatgggctaagcctgaatatactgggggctttaaaattaccagttatatcgttgaaaagagagaccttcctaatggacggtggctgaaggccaacttcagcaacattttggagaatgaatttacagtcagtggcctaacagaagatgctgcatatgaattccgtgtgatcgccaaaaatgctgcaggtgccatcagtccaccatctgagccatctgatgctatcacttgcagggatgatgttgaggcaccaaagataaaggtggatgttaaatttaaggacacggttatattaaaagcaggtgaagcattcagactggaagctgatgtttcaggccgcccacctccaacaatggaatggagcaaagatggaaaagagctggaaggcacagcaaagttagaaataaaaattgcagatttctctactaatctggtaaacaaagattcaacaagaagggatagtggtgcctatacccttacagcgactaatcctggtggctttgctaaacacattttcaatgtcaaagttcttgacagaccaggcccacctgaaggacctttggctgtaactgaagtgacatcagaaaagtgtgtactatcatggttccctccactggatgatggaggtgccaaaattgatcattacatagtacagaaacgtgaaaccagcagattggcatggacaaatgtagcctcagaagtccaagtaacaaagctaaaggtcactaaactcttgaaaggcaatgaatacatattccgtgtcatggctgtaaataaatatggagtgggagagccactggaatcagagcctgtgcttgcagtgaatccttatggaccccctgatccgcccaaaaaccctgaagtgacaactattactaaagattcgatggttgtctgctggggacatcctgattctgatggtggaagtgaaatcatcaattatattgtggaacggcgtgataaagctggccaacgctggattaaatgcaacaaaaaaactcttactgatttaagatataaagtgtctggactgacagaaggacatgaatatgagttcaggattatggctgaaaatgctgctggaattagtgcaccaagtcctaccagtccattttacaaggcttgtgacactgtgtttaaacctggaccaccaggtaacccacgtgttctggatacaagcagatcatccatttcaatcgcttggaataaacctatctatgatggtggttcagaaatcactgggtatatggttgagattgccctgccagaggaagatgaatggcagattgtcactccaccagcaggactcaaggcaacttcgtatactatcactggcctcacagagaatcaggaatataagatccgcatctatgccatgaattccgaaggacttggggaacctgcccttgttcctggaactccaaaggctgaagacagaatgctgcctccagaaattgaactggatgctgacctgcgcaaagttgttactataagggcctgctgcaccctgagactttttgttcccatcaaaggaaggcctgcacctgaggtgaagtgggcccgggaccatggagaatctttagataaagctagcatcgaatccacaagctcttacaccctgcttattgttggaaatgtaaacagatttgacagtggcaaatatatactaactgtagaaaatagttcaggcagcaagtctgcatttgtcaatgttagagttctcgatacaccaggccccccacaggatctgaaggtaaaagaggtcactaagacatctgtcacactcacatgggacccacctctccttgatggaggttcaaaaatcaagaactatattgttgaaaagcgggaatcaacaagaaaagcatattcaactgttgcaacaaactgccacaagacttcctggaaggtagaccagcttcaagaaggctgtagctactatttcagggttctcgcagaaaatgaatatggcattgggctgcctgctgaaaccgcagaatctgtgaaagcatcagaacgacctcttcctccaggaaaaataactttgatggatgtcacaagaaatagtgtgtcactctcttgggagaaaccagagcatgatggaggcagccgaattctaggctacattgtggagatgcagaccaaaggcagtgacaaatgggccacgtgtgccacagtcaaggtcactgaagccactatcactggattaattcagggtgaagaatactctttccgtgtttcagctcagaatgaaaagggcatcagtgatcctagacaactgagtgtgccagtgatcgccaaagatcttgtcattccaccagccttcaaactcctgttcaatactttcactgtactggcaggtgaagacctaaaagttgatgttccattcattggccgccctaccccagctgtaacctggcataaagataatgtaccactgaagcagacaactagagtaaatgcagagagcacagaaaataattcactactgacaataaaggacgcctgccgagaagatgttggccattatgtggttaaactgactaactcagctggtgaagctattgaaacccttaatgttatcgttcttgacaaaccagggcctccaactggaccagttaaaatggatgaagtgacagctgatagtattactctttcctggggcccacccaagtatgatggtggaagttctatcaataattacattgttgagaaacgggacacttccacaaccacctggcaaattgtatcagctacagttgcaaggacaacaataaaggcttgcagactgaagactggatgtgaatatcagtttagaattgcagctgaaaacagatatgggaagagtacctacctcaattcagagcctactgtagcccaatatccattcaaagttcctggtcctcctggcactccagttgtcacactgtcctccagggacagcatggaagtacaatggaatgagccaatcagtgatggaggaagtagagtcattggctatcatctagaacgcaaggaaagaaatagcatcctctgggttaagttgaataaaacacctattcctcaaaccaagtttaagacaactggccttgaagaaggtgttgaatatgaatttagagtctctgcagagaacatcgtgggcattggcaagccgagtaaagtatcagaatgttatgtggctcgtgacccatgtgatccaccaggacggccagaggcaatcattgtcacaaggaattctgtgactcttcagtggaagaaacccacctatgacggtggaagcaagatcactggttatattgttgagaagaaagaattacctgagggccgttggatgaaagccagttttacaaatattattgacactcattttgaagtaactggcctagttgaagatcacagatatgagttccgggttatagcccgaaatgccgcaggagtgtttagtgagccttcagaaagcacaggagcaataacagctagagatgaggtagatccaccacgaataagtatggatccaaaatacaaagacacaatcgtggttcatgctggtgaatcattcaaggttgatgcagatatttatggcaaaccaataccaaccattcagtggataaaaggtgatcaggagctttcaaacacagctcgattagaaataaagagcaccgactttgccaccagtctcagtgtaaaagatgcagtacgtgtcgacagtggaaattacatactgaaggccaaaaatgttgcaggagaaagatcagttactgtgaatgtcaaggttcttgacagaccagggccacctgaaggacctgttgttatctcaggagttacagcagaaaaatgcacactagcttggaaacccccacttcaggatggtgggagtgacatcataaattatattgtggaaaggagagaaaccagccgcttagtttggactgtggttgatgccaatgtgcagactctcagctgcaaggttactaagcttcttgaaggcaatgaatatactttccgtataatggcagtaaacaaatatggtgttggtgaacctcttgaatctgagccagtagttgccaagaatccatttgtagtaccagatgcaccaaaagctccagaagtcacaacagtgaccaaggactcaatgattgttgtatgggaaagaccagcatctgatggtggtagtgaaattcttggatatgttcttgagaaacgggataaagaaggcattagatggacaagatgccataagcgtctgattggagagttgcgcctgagagtaactggactcatagaaaatcacgattatgagttcagagtttctgctgagaatgctgctggacttagtgaaccaagccctccttctgcttaccaaaaggcttgtgatcctatttataaaccaggacccccaaacaaccccaaagtcatagacataaccagatcttcagtattcctttcttggagcaaaccaatatatgatggtggctgtgaaattcaaggatacattgttgaaaaatgtgatgtgagtgttggtgaatggacaatgtgcactccaccaacaggaattaataaaacaaacatagaagtagagaagctgttggaaaagcatgaatacaacttccgtatctgtgctattaataaagctggagttggagaacatgctgacgtccctggacctattatagttgaagaaaaattagaagcaccagacattgatcttgacctagaactaaggaaaatcataaatataagggcaggtggctccttaaggttatttgttcctataaaaggtcgtcctacaccagaagttaaatggggaaaggtggatggtgaaatccgagatgcagctataattgatgtcactagcagtttcacctctcttgttcttgacaatgtcaaccgatatgatagtggaaaatatacgcttacattagaaaacagcagtggaacaaagtctgcctttgttactgtgagagttctggacacgccaagtccacctgttaacctgaaagtcacagaaatcaccaaagactcagtatcaattacatgggaacctcctttgttggatgggggatccaaaataaaaaattacattgttgagaaacgtgaagccacaagaaaatcatatgctgctgttgtaactaactgccataagaattcttggaaaatcgatcagctccaagaaggttgcagttattactttagagtcacagctgagaatgagtatggtattggccttcctgcccagactgctgatccaattaaggttgcagaagtgccacaacctcctggaaaaataactgtggatgatgtcaccagaaacagtgtctctctgagttggacaaaacctgaacatgatggtggcagtaaaatcattcagtatattgtggaaatgcaagctaaacacagtgagaaatggtcagagtgtgctcgagtaaagtctcttcaggcagtaattaccaacctaactcaaggggaagaatatctttttagagttgttgctgtaaatgaaaaggggagaagtgatcctcggtcccttgcagttccaatagttgccaaagatctggtaattgagccagatgtaaaacctgcattcagtagttacagtgtacaggttggccaagatttgaaaatagaagtgccaatttctggacgtcctaagccaaccattacctggactaaagatggtctcccactgaagcagaccacaagaatcaatgttaccgattcactggatctcaccacactcagtattaaagaaactcataaggatgatggtggacaatatggaatcacagttgccaatgttgttggtcagaagacagcatccatcgaaattgtaactctagataaacctgatcctccaaaaggacctgttaaatttgatgacgtcagtgctgaaagtattacattatcttggaaccctccattatatacagggggctgccaaatcaccaactacattgttcagaaaagagatacaaccaccacagtatgggatgttgtttctgctactgttgctagaactacactcaaagtgaccaaactgaaaactggtacagaataccaatttagaatatttgccgaaaacagatatggacaaagctttgccttagagtctgatccaattgtagctcaatatccctacaaagaaccaggccctccaggtacaccatttgccacagccatttccaaagactccatggtcatacagtggcatgaaccagtcaacaatggtggaagccccgtcataggttaccacctggagagaaaagaaagaaacagtattttgtggacaaaggtcaacaaaactattattcatgacacccaattcaaagcacagaatcttgaagaaggcattgaatatgaattcagagtgtatgctgaaaatattgttggtgtaggcaaagcaagcaagaattctgaatgctatgtagccagagatccctgtgacccaccaggaaccccagaaccaataatggttaaaagaaatgaaatcactttacagtggaccaaacctgtgtatgatggtggaagtatgattacaggctacattgtagagaaacgtgatttgcctgatggtcgttggatgaaagctagctttacaaatgtcattgaaactcaatttactgtgtcaggtcttactgaagatcaaagatatgaattcagagtcattgcaaagaatgcagctggtgcaataagtaaaccctctgacagtactggaccaataactgccaaggatgaggttgaactcccaagaatttcaatggatccaaaattcagagacacaattgtggtaaatgctggagaaacattcagacttgaggctgatgtccatggaaagcccctacctaccattgagtggttaagaggagataaggaaattgaagaatctgctagatgtgaaataaagaacacagatttcaaggctttacttattgtaaaagatgcaattagaattgatggtgggcagtatattttaagagcttccaatgttgcaggttctaagtcattcccagtaaatgtaaaagtattagatagaccaggacctccagaagggccagtccaggttactggagtcacttctgaaaaatgctctttaacatggtctccaccacttcaagatggtggcagtgacatttctcactatgttgttgaaaagcgagaaaccagtcgacttgcctggactgttgttgcttcagaagttgtgaccaattctctgaaagttaccaaactcttagaaggtaatgaatatgttttccgtataatggctgtcaacaaatatggtgttggagagcctttggaatctgcaccagtactaatgaaaaatccatttgtgcttcctggaccaccaaaaagcttggaagtcacaaatattgccaaagactccatgaccgtctgttggaaccgtccagatagtgatggtggaagtgagattattggttacattgtagagaaaagagacagaagtggcattcgatggataaaatgtaataaacgccgcattacagatttgcgtctaagagtgacaggattaacagaagatcatgagtatgaattcagggtctctgcagaaaatgctgctggagttggggaaccaagtccagctacagtttattataaagcctgtgatcctgtgttcaaacctggcccacctaccaatgcacacattgtagacaccactaaaaattcaatcacacttgcctggggtaaacccatctatgatggcggcagtgagatcttgggatatgtagtagaaatctgtaaagcagatgaagaagaatggcaaatagttactccacagactggcctgagagtcactcgatttgaaatttcaaaactcactgaacaccaagagtataaaatacgagtctgtgccctcaacaaagttggtttaggtgaggctacatcagttcctggtactgtgaaaccagaagataaacttgaagcacctgaacttgaccttgactccgaattaagaaaaggaattgttgtaagagctggtggatctgccagaattcacattccattcaaaggtcgtccaacgcctgagatcacttggtctcgagaggaaggtgaattcacagataaggtccaaattgaaaagggagtaaactatacccaactatcaatagataactgtgatagaaatgatgctggaaaatacattcttaagttggaaaacagcagtggatcaaagtctgcttttgtaactgtgaaagttcttgacactccaggaccaccacagaatttggcagtcaaagaagtgagaaaagattctgccttcctggtatgggagccacccatcattgatggaggggcaaaggtcaagaactatgtgattgacaaacgtgagtcaaccagaaaagcgtatgctaatgtgagtagtaaatgcagcaaaacaagttttaaagtggaaaaccttacagaaggagccatttattacttcagagtcatggctgaaaatgaatttggagttggtgttccagtggaaactgttgatgccgtgaaagctgctgaacctccttccccaccaggaaaggttacactcactgatgtgtcccagaccagtgcatcacttatgtgggagaaacctgaacatgatggcggtagcagagtcctggggtacgttgttgaaatgcagcccaaaggaactgaaaaatggagcattgtggctgaatccaaagtctgtaatgcagttgttactggtttgagttctggacaagaatatcagttccgtgtcaaggcttataatgagaaaggaaaaagcgatccaagagtgttgggtgttcctgtcatagccaaggacttgactatacagcctagtttaaagttaccatttaacacatatagtatccaagctggagaagatcttaaaatagaaattccagttataggccgaccaagacctaacatttcttgggtcaaagatggtgagcctcttaaacagacaacaagagtaaacgttgaagaaacagctacctcaactgttttgcacattaaagaaggtaacaaagatgactttggaaaatacaccgtaacggcaacaaatagtgcaggcacagcaacagaaaatctcagtgttatcgttttagaaaagcctggacctccagttggcccagttcggtttgatgaagttagtgcagactttgtagtcatatcttgggaacctccagcctatactggtggctgccaaataagcaactacattgtagagaagcgagatacaaccaccaccacttggcacatggtatcagcaacagttgcaagaacaacaattaaaataaccaaactgaaaacaggcacggagtaccagtttagaatttttgctgaaaacaggtatggaaaaagtgccccactggattctaaggcagttattgtacaatatccatttaaagaacctggaccacctggaactccttttgtgacatcaatctcaaaagatcagatgcttgtgcaatggcatgagccagtgaatgatggaggcaccaaaattattggctaccatcttgaacagaaagaaaagaacagtattttatgggtcaagttaaataagacccccattcaggacaccaaattcaaaacaactgggcttgatgagggccttgagtatgagttcaaagtttctgctgaaaatattgttggcattggcaagcctagcaaagtgtcagaatgctttgttgctcgtgatccatgtgacccacctggtcgccctgaagccattgttattacaagaaacaatgtcacactgaaatggaagaaacctgcctatgatggtggtagcaaaataacaggttatattgtagaaaagaaagatctacctgatggccgctggatgaaagccagctttaccaacgtattagaaactgaatttacagtgagtggacttgtagaagaccaaagatatgaatttagagtaattgcaagaaatgcagctggaaactttagtgaaccatctgatagtagtggtgccattactgcaagagatgaaattgatgcaccaaatgcctctctggatccaaaatataaagatgtcatcgttgttcatgcaggagagacttttgttcttgaagccgacatccgtggcaaacctatacctgatgttgtttggtcaaaagatggaaaagaacttgaagaaacagctgctagaatggaaattaaatctactattcagaaaacaactcttgttgtcaaagactgtatacggactgatggaggacaatatattctgaaactcagcaatgttggtggtacaaagtctatacccatcactgtaaaggtacttgacaggccagggcctcctgaagggcctctgaaagttactggagttactgcggaaaaatgttacctggcatggaacccacctttgcaagatggtggtgctaatatttcacattacatcattgaaaagagggagacaagccgactctcttggacccaggtttcaactgaggtacaggcccttaactacaaagttactaaacttcttcctggtaatgagtacattttccgtgtcatggctgtgaataaatatggaattggagagcccttggaatctgggcctgttacggcctgtaatccttataagccaccaggtcctccctcaacacctgaagtctcagcaatcaccaaagattctatggtagtaacatgggcacgcccagtagacgacggaggtaccgaaattgagggctacattcttgaaaaacgagataaggaaggcgttagatggaccaagtgcaacaagaaaacattaacggatctgcggctcagggtaactggtcttaccgaaggccattcctatgaattcagagttgctgctgaaaatgcagctggtgtgggagaacctagtgagccatctgttttctaccgtgcgtgtgatgccttgtatccaccaggtcccccaagcaatccaaaagtgacggacacttccagatcttctgtctccctggcatggagtaagccaatttatgatggtggcgcacctgttaaaggctatgttgtagaggtcaaagaagctgctgcggatgaatggacaacctgcactccaccaacaggattacaaggaaagcagttcacagtgaccaagcttaaagaaaacactgaatataacttccgtatttgtgccatcaattctgaaggtgtaggtgaacctgcaactctacctggctcagtggttgctcaggagaggatagagccaccagaaatagaactcgatgctgatctcagaaaggtggtcgttctgcgtgcaagtgctactttacgcttatttgtcactatcaaaggtcgaccagaacccgaagttaaatgggaaaaggcagaaggcattctcactgacagggctcagatagaggtgaccagctcatttacaatgttggtgattgataatgttaccagatttgacagtggtcggtataatctgacattagaaaataatagtggctccaaaacagcttttgttaacgtcagagttcttgactcaccaagtgcccctgtgaatttgaccataagagaagtgaagaaagactcagtgacgttgtcctgggaaccaccacttattgatggtggagctaagattacaaactacattgtcgaaaaacgagaaactacaagaaaagcctatgctaccattacaaataattgcactaaaactactttcagaattgaaaatctacaagaaggatgttcttactacttccgagtcttggcttccaatgaatatgggattggtttgccagctgaaacaacagaacccgttaaagtgtctgaaccacccctcccacctggaagagtaactcttgttgatgtgacccgtaatacagctacaattaagtgggagaaaccagaaagtgatggtggcagcaaaattactggttatgtggttgaaatgcagactaaagggagtgaaaagtggagcacctgcacacaagttaagactctagaagcaactatatctggcttaactgcaggagaagagtatgtcttcagggtagctgcagttaacgaaaagggaagaagtgatccaagacaacttggagtgccagtaattgcaagggatattgaaataaagccttcagttgagcttcctttccatactttcaatgtaaaggctagagaacaacttaagattgatgtgccattcaaaggaagacctcaagctactgtgaactggagaaaagatggtcagactcttaaagagacaactagagtcaatgtttcttcttcaaagactgtaacatcactatctattaaggaagcttcaaaggaagatgttggaacttatgaattatgtgtttcaaacagtgctggatccataacagttcctattactataattgtccttgacagaccaggacctccaggtcctatacgtattgatgaggttagttgtgacagcataaccatttcttggaatcctccagaatatgatggtggctgccaaattagcaattacattgttgaaaagaaagaaaccacctctacaacatggcacatagtttcacaagcagttgcaagaacatccattaaaatagttcgcctgacaacaggaagtgagtatcagttccgtgtttgtgcagaaaaccgctatggaaagagctcctacagtgaatcttcagctgttgttgcagagtatccattcagtcccccaggtcctcctggtactcctaaagttgtgcatgccacaaaatctaccatgcttgtaacctggcaagtgccagttaatgatggaggaagtcgagtaattggctatcatcttgagtataaagaaagaagcagcattctttggtcaaaagcaaataaaatcctcattgctgatactcaaatgaaagtctccggccttgatgaaggactgatgtatgagtatcgtgtatatgctgaaaatattgctggaattggtaaatgcagtaaatcttgtgaaccagtccctgcaagagatccttgtgaccctcctggacaacctgaagtcacaaatatcacaagaaaatcagtgtcacttaaatggtctaaaccacattatgatggtggagctaagatcacaggatacattgttgaacgcagagaactaccagatggccggtggctgaagtgcaattatactaatatacaagaaacatactttgaagtaactgaacttactgaagatcagcgttatgaattccgggtttttgcaaggaatgctgctgactcagttagtgagccatctgaatccactgggcctattatagttaaagatgatgttgagcctccaagagttatgatggatgtcaagttccgagacgttattgttgtcaaagctggagaggtccttaagataaatgcagacattgcagggcgacctctgccagtaatttcctgggccaaggatggtatagaaattgaagaaagagcaagaacagaaatcatctcaacagacaatcatactttgttaacagttaaagactgtataagacgagacactgggcaatatgtactaacactgaagaatgttgccggcactcggtctgtggccgttaattgcaaagtacttgataagcctggtccaccagcaggaccacttgaaataaatggcctcactgctgagaaatgctctctttcctggggacgtccccaagaagatggtggtgcagatatcgactattacatcgtagaaaaacgtgaaacaagccaccttgcatggacaatatgtgaaggagagttacagatgacatcctgtaaagtaaccaagttactcaaaggcaatgaatatatatttagagtaactggtgttaataaatatggtgttggtgagcccctagagagtgtagctataaaggcactagatccatttacagttccaagtccacccacgtctttggaaattacttctgtgaccaaagaatctatgacactttgctggtcaagacccgagagtgatggaggtagtgaaatatctggatatataattgaaaggcgagagaaaaatagcctaagatgggtgcgtgtaaacaaaaaaccagtttatgatctaagagtgaaatcaacaggacttcgggaaggatgtgaatatgaatatcgtgtttatgcagaaaatgctgctggcctaagtcttccaagtgaaacctctcccttaattagggcagaagatccagtgttcctaccatctcctccatccaaacccaaaattgtggactcaggcaagacaactataactattgcctgggttaagccgctgtttgatggtggggccccgataactggatatactgtagaatacaaaaaatctgatgacactgactggaaaacttccattcagagcttacgagggacagaatatacaataagcggactaacaacaggagctgaatatgttttcagagtaaaatctgtcaataaggttggtgctagtgaccccagtgatagctctgaccctcagatagcaaaggaaagagaagaagaacctttatttgatattgacagtgaaatgaggaagaccttgattgtcaaggctggtgcctcatttaccatgactgtgcctttccgaggaagaccagtacccaatgtcttgtggagtaagccagacactgacctccgtactagagcttatgttgataccacagactcccgtacatcactgaccattgaaaatgccaacagaaatgactctggaaagtacacattaacaattcagaatgttttgagtgctgcttcactgaccttagttgtcaaagttttagataccccaggtcctccaaccaacattactgtgcaagatgtaaccaaagagtctgcagtgttatcctgggatgttcctgaaaacgatggtggagcaccagtgaagaattaccacatagaaaaacgtgaggccagcaagaaagcatgggtctctgtgaccaacaactgtaaccgcctctcctacaaagttaccaatttacaagaaggagctatctattacttcagagtctctggagaaaatgagtttggtgttggtataccagctgaaacaaaggaaggagtaaaaataacagaaaaaccaagcccacctgaaaaacttggagtaacaagtatatccaaagacagtgtttccctgacctggctgaagcctgaacatgatggcggaagcagaattgtacactatgtcgttgaagcactagaaaaaggacagaaaaactgggttaaatgtgcagtggcaaagtcaacccatcacgttgtttccggtctgagagagaattctgaatactttttccgagtgtttgctgaaaatcaagctggcctgagtgacccgagagagcttctgcttcctgttcttattaaggagcaactagaaccacctgaaattgatatgaagaatttcccaagtcacactgtatatgttagagctggttcaaaccttaaagttgacattccaatctctggaaaaccacttcccaaagtgaccttatcaagagatggtgtcccccttaaggcaaccatgagatttaataccgaaattactgctgagaacctgaccatcaatctcaaagaaagtgttacagctgacgctgggagatatgaaatcactgctgccaactccagtggtacaaccaaagctttcattaacattgttgtgctagacaggcctggtcctccaactggccctgttgttattagtgatataactgaagaaagtgtgactctcaaatgggagccacctaagtatgacggtggaagtcaagttaccaactacattctactcaaaagagaaacaagtactgcagtgtggactgaagtgtctgcaacagttgcaagaaccatgatgaaagtcatgaaactgaccacaggagaagaataccaattccgcatcaaggcagaaaaccgctttggcatcagtgatcatatagattcagcttgtgtgactgtcaaactaccatacacaacacctggaccaccatctacaccatgggtcactaatgttactcgagaaagcatcactgtgggctggcatgaaccagtgtcaaatggaggcagtgcagtcgtaggctatcacctggaaatgaaagacagaaacagtattttatggcaaaaagccaacaaactggtcatccgcacaactcacttcaaagtcacaacaatcagtgctggacttatttatgaattcagggtgtatgcagaaaatgctgctggagttggaaaacctagccatccttctgaaccagtcttggcaattgatgcttgtgaacccccaagaaatgttcgtatcactgatatttcaaagaactctgtcagcctttcatggcaacaaccagctttcgatggaggtagcaagattacaggctacattgttgagagacgtgaccttccagatggcagatggaccaaggccagcttcaccaatgttactgaaactcaattcatcatctctggcttgactcagaattcccagtatgaattccgtgtctttgctaggaatgctgttggttccattagcaatccatctgaggttgtagggcccattacttgcatcgattcttatggtggtcctgtaattgatttgcctctagaatatacagaagttgtcaaatacagagcaggtacatctgtgaagctcagagctggcatttctggcaaacctgcgcctactattgagtggtataaagatgataaagaattacaaaccaatgcactggtgtgtgttgaaaataccacggacctcgcatctatactcatcaaagatgccgatcgccttaatagtggatgctatgaattaaaactaaggaatgccatgggctcagcctcagccaccatcagagtacagatccttgacaaaccaggcccacctggtggaccaattgaatttaagactgtaactgctgagaagatcacccttctctggcggcctccagctgatgatggtggtgcaaaaatcactcactacattgtggaaaagcgtgagacaagccgcgttgtgtggtctatggtgtctgaacatttggaagagtgcatcattacaaccaccaaaattatcaaaggaaatgaatacatcttccgggtccgagccgtgaacaaatatggaattggcgagccactggaatctgattccgttgtagccaagaacgcatttgttacacctgggccaccaggcataccagaagtgacaaagattaccaagaattcgatgactgttgtatggagcaggccaattgcagatggcggtagtgatataagtggctatttccttgaaaaacgagacaagaagagcctaggatggtttaaagtactaaaagagactatccgtgacaccagacaaaaagtaacaggactcacagaaaacagtgactatcaatacagagtttgtgctgtaaacgctgctggacagggtccattttctgaaccatctgaattctacaaagctgctgatcctattgatcctccaggtccacctgctaagataagaatcgcagattcaaccaagtcatccatcacccttggctggagtaagcctgtctatgatgggggcagtgctgttactgggtatgttgtcgagataagacaaggagaggaagaggaatggactactgtctctaccaaaggagaggtcagaactacagaatatgtggtatccaacctgaaacctggagtcaattactacttccgggtatctgctgtaaactgtgctggacaaggagaacctatagaaatgaatgaacctgtacaagctaaagatatacttgaggcaccagagattgacctggatgtggctctcagaacttctgttattgccaaagctggtgaagatgtacaagtgttgattccctttaaaggcagacctccacctactgtcacatggagaaaagatgagaagaatcttggcagtgatgccagatacagcattgaaaacactgattcatcctcattactcaccattcctcaagttactcgcaatgatacaggaaaatatattctcacaatagaaaatggagttggtgaacctaagtcttcaactgtgagtgttaaagtgcttgacacaccagctgcctgccagaaactacaggttaaacatgtttctcgaggcacagtcactttgctctgggatcctcctctcattgatggaggatctccaataattaattatgtcattgaaaagagagatgccaccaagagaacatggtctgtcgtgtcacacaaatgttctagcacatccttcaagctaatagatttgtcggagaagactccattcttcttcagagttcttgcagaaaatgaaattggaattggggaaccctgtgaaactacagagccagtgaaggctgctgaagtaccagctcctatacgtgatctctcaatgaaagactcaacaaagacatctgtcatcctcagctggaccaaacctgactttgatggtggtagcgtcatcacagaatatgttgtagaaaggaaaggtaaaggtgaacagacgtggtcccacgctggcataagtaagacatgtgaaattgaggttagccaacttaaggagcagtcagtcctggagttcagagtgtttgccaaaaatgagaaaggactgagtgatcctgtcactattgggccaattacagtgaaagaacttattattacacctgaagttgacctgtcagatatccctggggcacaagtcactgtgagaattgggcacaatgtgcaccttgaattaccttataagggaaaacccaaaccatccatcagttggctgaaagatggcttgccactgaaagaaagtgaatttgttcgcttcagtaaaactgaaaacaaaattactttgagtattaagaatgccaagaaggagcatggaggaaaatacactgttattcttgataatgcagtgtgtagaattgcagtccccattacagtcatcacccttggcccaccatcaaagcccaaaggacccattcgatttgatgaaatcaaggctgatagtgtcatcctgtcatgggatgtacctgaagataatggaggaggagaaattacttgttacagcatcgagaagcgggaaacttcacaaactaactggaagatggtgtgttcaagtgttgccagaacgactttcaaagttcctaatctagtcaaagatgctgagtaccagtttagagtgagagcagaaaacagatacggagtcagccaaccacttgtctcaagcattattgtggcaaaacaccagttcaggattcctggtcccccaggaaagccagttatatacaatgtgacttctgatggcatgtcactaacttgggatgctccagtttatgatggtggttcagaagttactggattccatgttgaaaagaaagaaagaaatagcatcctctggcaaaaagttaatacatcaccaatctctggaagagaatatagagccactggactggtagaaggtctggattaccaattccgtgtatatgctgaaaattctgctggcctaagctcacctagtgacccaagcaaatttaccttagctgtttctccagtagacccacctggcactcctgactacattgatgtcacccgggaaaccatcacacttaaatggaacccaccattgcgtgatggaggcagtaagattgtgggctatagcattgagaaacggcaaggaaatgaacgctgggtgagatgcaactttactgacgtcagtgaatgtcagtacacagttacaggactcagtcctggggatcgctatgagttcagaataattgcaagaaatgctgttggaactataagcccgccctcacagtcttctggcattattatgacaagagatgaaaatgttccaccaatagtagagtttggccctgaatactttgatggtctcattattaagtccggagagagccttagaattaaagctttggtacaaggaagaccagtgcctcgagtaacttggttcaaagatggagtggaaatcgaaaagaggatgaatatggaaataaccgacgtacttggatccaccagcctatttgttagagatgctactcgggaccatcgtggtgtatacacagtggaagccaaaaatgcatctggttctgcaaaagcagaaattaaagtgaaagtacaagatacaccaggaaaagtagttgggccaataagattcaccaatattactggggagaagatgactctgtggtgggatgccccactcaatgacggttgtgctcccataacccactacatcattgaaaaacgggaaaccagcagacttgcctgggcactaattgaggataaatgtgaagcccaaagttacactgccattaaactaataaacggcaatgaataccaattccgtgtttctgcagttaacaagtttggtgttggcaggccacttgattctgatccagtggttgctcaaatacaatatactgttcctgatgcccctggcattccagaacctagcaacataacaggcaacagcattaccctgacatgggcaaggccagaatcagatggtggcagtgaaattcaacagtatatccttgaaagaagagaaaagaaaagcacaagatgggtaaaagtgatcagcaaacgaccaatctctgaaacaagattcaaagtcactggtctgacagaaggcaatgagtatgaattccatgtcatggctgaaaatgctgcaggagttggacctgcaagtggcatctcaagactcattaaatgtagagagcccgtcaacccaccaggtcctcccacagtggtcaaagtaacagacacatcaaagacaactgtgagcttagaatggtccaaaccagtgtttgatggtggcatggaaataattgggtatattattgaaatgtgtaaggccgacttaggagactggcacaaggtgaatgcagaggcatgtgtgaaaacaagatatacagtcactgatctacaagcaggtgaagaatacaaattccgagttagtgctatcaatggtgctggaaaaggcgacagctgtgaagtgactggcacaattaaagcagttgaccggttaacagctcctgagttagacatagatgcaaacttcaaacagactcatgttgttagagctggggccagtattcgcctcttcattgcctaccaaggtagacctactcctacagctgtgtggagcaaaccagactctaaccttagccttcgggctgatatccatacaacagattccttcagcaccctcactgtggaaaactgcaacagaaatgatgcagggaaatatacccttactgtggaaaacaacagtggtagtaagtcaatcacattcaccgtgaaagtgctagacactccaggcccacctggcccaattaccttcaaagatgtgacccggggatctgctacattgatgtgggatgcccctcttcttgacggtggtgcccgaatccatcattatgtggtagagaaacgagaggcaagtcgccgtagttggcaggttatcagtgaaaaatgcactcgtcagatcttcaaggtcaatgacctggccgaaggtgttccgtactatttccgtgtttctgcagtaaatgagtatggtgttggtgagccctatgaaatgccagaaccaattgtagccacagaacagcctgctccacctaggagacttgatgttgttgatactagcaaatcctccgcagtcttagcttggcttaaacctgaccacgatggaggcagccggatcactggctacctgcttgaaatgagacaaaagggatctgacttctgggttgaagctggtcacaccaaacagctaactttcacagtagagcgtcttgttgagaaaactgaatatgaattccgtgtgaaggccaagaatgatgctggctatagtgaacccagagaagccttctcttctgtcatcattaaggagcctcaaatcgagcccactgctgacctcactggaattaccaatcagcttataacttgcaaagcaggaagcccatttaccattgacgtaccaatcagtggtcgtcctgcccccaaagtaacatggaaactggaagaaatgagacttaaagagacagatcgagtgagcattacaacaacaaaagacagaaccacactgactgtaaaggacagcatgagaggtgactctggaagatacttcttgaccctggaaaatacagctggtgttaaaacatttagcgtcacagttgtggtcattggaaggccaggtccagtaaccggccccattgaggtctcatctgtctcagctgaatcgtgtgtcctgtcatggggagaacctaaagatggaggaggcactgaaattactaattacatagttgaaaagcgtgaatcgggtacaacagcttggcagcttgtcaattccagtgtcaagcgcactcaaattaaagtcactcatctcacaaaatacatggaatattctttccgtgtcagttcagagaacagatttggtgtcagcaaacctctagaatcagcaccaataattgctgaacatccatttgtcccaccaagcgctcctaccagacctgaggtctaccatgtgtctgccaatgccatgtctattcgttgggaagaaccctaccacgatggtggcagtaaaatcattggctactgggttgagaagaaagaacgtaatacaattctttgggtgaaagaaaacaaagtgccatgcttagagtgcaactacaaagtaactggtttagtagaaggactggaatatcagttcagaacttatgcactcaatgctgcaggtgttagcaaggccagcgaagcttcaagacctataatggctcaaaatccagttgatgcaccaggcagaccagaggtgacagatgtcacaagatcaacagtatcactgatttggtctgccccagcgtatgatggaggcagcaaggttgtgggctacatcatagagcgtaagccagtcagtgaggtaggagatggtcgctggctgaagtgcaactacaccattgtatctgacaatttcttcaccgtgactgctctcagtgaaggagacacttatgagttccgtgtgttagccaagaatgcagcaggcgtaattagcaaagggtctgaatctacaggccctgtcacttgccgagatgaatacgctccacccaaagccgaactggatgcccgattacacggtgatctggttaccatcagagcaggttctgatcttgttctggatgctgcagttggtggcaaacctgaacccaaaattatctggaccaaaggagacaaggagctagatctctgtgaaaaagtctctttgcagtatactggcaaacgagcaactgctgtgatcaagttctgtgacagaagtgacagtggaaaatacactttaacagtgaaaaatgccagcgggaccaaggccgtgtctgtcatggtcaaagtgcttgattcccctggcccatgtggaaagctcaccgtcagcagagtaacacaggagaagtgcactttagcctggagccttccgcaggaagacggaggagcagaaatcactcactacatcgtggaaagacgcgagactagcaggctcaactgggtgattgttgaaggcgaatgcccaaccctatcctatgtcgttaccaggctcatcaagaacaatgagtacatattccgagtgagggcagtaaacaaatatggccctggtgtgcctgttgaatcagagccaattgtagccagaaactcattcactattccatcaccacccggcatacctgaagaagttgggactggcaaagagcatatcatcattcagtggacaaaacctgaatctgatggtggcaatgaaatcagcaactacctagtagacaaacgtgagaagaagagcctgcgctggacacgtgtcaacaaagactatgtggtgtatgataccaggctgaaggtgaccagcctgatggagggttgtgattaccagttccgggtgaccgcagtgaatgcagctggtaacagtgagcccagcgaagcttccaacttcatctcatgcagagaaccatcatatacccctggaccaccttctgctccaagagttgtggataccaccaaacacagcattagtttggcatggaccaaacccatgtacgatggtggtactgacattgtaggatatgttctggaaatgcaagagaaggacactgatcagtggtaccgagtgcataccaatgccacaataagaaatactgaattcactgtgccagaccttaaaatgggccagaaatattccttcagagttgctgccgtgaacgtgaagggtatgagcgaatacagcgaatcaattgctgaaattgagcccgtggaaagaatagaaataccagatcttgagcttgcagatgatctaaagaagactgtgaccatcagggctggggcctccttgcgcttgatggtgtctgtatctggaagaccacctcctgtcataacgtggagcaagcagggcattgaccttgcaagccgggcaattattgacaccactgagagctactcattgctaatagtggacaaagttaatcggtacgatgctggaaaatacacaattgaagctgaaaaccaatctggcaagaaatcagcaacagtccttgttaaagtctatgatactcctggtccctgtccttcagtgaaagttaaggaagtatcaagagattctgtgactataacttgggaaattcccacgattgatggtggagctccagtcaacaattacatcgttgagaagcgtgaagctgctatgagagcattcaaaacagtaactaccaaatgcagcaagacactttacagaatttctggacttgtagaaggaaccatgtactatttcagagtgctgccagaaaatatttatggcattggagaaccttgtgaaacatctgatgcagtactggtctcagaagtgcctttggtgcctgcaaagctagaagtggtcgatgtcaccaaatccactgttacccttgcctgggaaaaaccactctacgatggtggtagccgactcactggatatgttctcgaggcctgcaaagctggcacagagagatggatgaaggttgtcaccttaaaacccacagtcctagagcacactgttacttccttaaatgaaggtgaacaatacttatttagaataagggcacaaaatgagaaaggtgtgtcagaaccaagagagactgtcacagccgtgactgtacaagacctcagagtgttgccaacaatcgatctttctacaatgcctcagaagaccatccatgtcccagctggcagaccagtagagctggtgatacctattgctggccgtccacctcctgctgcttcctggttctttgctggttctaaactgagagaatcagagcgtgtcacagttgaaactcacactaaagtagctaaattaaccatccgtgaaaccactatcagagatactggagaatacacacttgaattgaagaatgttaccggaactacttcagaaaccattaaagttatcattcttgacaagcctggtccaccaacaggacctattaagattgatgaaattgatgctacatcaattaccatttcctgggaaccacctgaattggacggtggtgctccactgagtggttatgtggtagaacaacgtgacgctcatcgtccaggatggctgcccgtttctgaatcagtgactaggtccacgtttaagtttaccagactcaccgaaggaaatgagtatgtgttccgtgtggctgcaacaaaccgcttcgggattggctcttacttgcagtctgaggtcatagagtgtcgcagcagcatccgtattcctggacccccagaaacattacagatatttgatgtttcccgtgatggcatgacacttacttggtacccaccagaggatgacggtggctcccaagtgactggatatattgtggagcgcaaagaagtgagagcagatcgatgggtccgtgtaaataaagtacctgtgacaatgacacggtaccgctccactggccttactgaaggcttagaatatgaacaccgtgtcacagccattaatgcaagagggtctgggaaaccaagtcgtccttccaaacccatcgttgccatggatccaattgctcctccaggaaagccacaaaacccaagagttactgatacaacaaggacatcagtctccctggcctggagtgttccagaagatgaaggaggatctaaagtcacaggctacttgattgaaatgcaaaaagtagatcaacatgaatggaccaagtgtaacaccactccaaccaagattcgagagtatactctaacacacctacctcagggtgcagaatacaggttccgcgtcctagcttgtaatgctggtggacctggtgagcctgctgaggtaccaggaacagtcaaagtcactgaaatgcttgaatatcctgattatgaacttgatgaaagataccaagaaggtatctttgtaaggcaaggtggcgtcatcagacttaccataccaatcaaaggaaaaccattcccaatatgtaaatggaccaaggaaggccaggatattagtaagcgtgccatgattgcaacatctgaaacacacactgagcttgtgatcaaagaagcagacaggggtgattctggcacttatgacctggttctggaaaataaatgtggcaagaaggctgtctacatcaaggtcagggtgataggaagtcccaacagtccagaagggccactggaatatgatgacatccaagtccgctctgtgagggtcagctggagacctcctgctgatgatggtggtgctgacatcttaggctacatcctcgagagacgagaagtgcctaaagccgcctggtataccattgattccagagtccgaggtacatctctggtggtaaaaggcctcaaagagaatgtagaataccatttccgtgtttcagcagaaaaccagtttggcataagcaaacccttgaaatctgaggaaccagtcacaccaaaaacaccattgaatcctccagaacctccaagcaatcctccagaagtactcgatgtaaccaagagttctgttagcttgtcctggtcccggcccaaagatgatggtggttctagagtcacaggctactacatcgaacgcaaagagacatccactgacaagtgggtcagacacaacaagactcagatcaccaccacaatgtacactgtcacagggcttgttcccgatgctgagtatcagttccgcatcatcgcacagaatgatgttggcctgagtgagaccagccctgcttctgaaccagttgtttgcaaagatccatttgataaaccaagccaaccaggagaacttgagattctttcaatatccaaagatagtgtcactctacagtgggagaaacctgaatgtgatggtggtaaagaaattcttggatactgggttgaatatagacagtctggagacagtgcctggaagaagagcaataaggaacgtattaaggacaagcaattcacaataggaggtttgctggaagctactgagtatgaattcagggtttttgctgagaatgagactgggctgagcagacctcgcagaactgctatgtctataaagactaaactcacatctggagaggccccaggaatacgcaaagaaatgaaggatgttaccacaaaattgggtgaagctgctcaactctcatgccagattgttggaaggcctcttcctgacattaaatggtacagatttggtaaagagctcatacaaagccggaaatacaaaatgtcttcagatggacgcacacacactcttacagtaatgacagaggaacaggaagatgaaggtgtttatacctgcatagccaccaatgaggttggagaagtagaaaccagtagtaagcttctcctgcaagcaacaccgcagttccatcctggttacccactgaaagagaaatattatggagctgtgggttccacacttcggcttcatgttatgtacattggtcgtccagtacctgccatgacttggttccatggtcagaaacttttgcaaaactcagaaaacattactattgaaaacactgagcactatactcatcttgtcatgaagaatgtccaacgtaagactcatgctgggaaatacaaagtccagctcagcaatgtttttggaacagttgatgccatccttgatgtggaaatacaagataaaccagacaaacctacaggaccaattgtgatcgaagctctattgaagaactccgcagtgatcagctggaaaccacccgcagatgacggaggctcctggatcaccaactatgtggtggaaaaatgtgaggccaaggagggggctgaatggcaattggtgtcttcagccatctcagtgacaacctgtagaattgtgaacctcacagaaaatgctggctattacttccgggtttcagctcagaacactttcggcatcagtgaccctctagaagtgtcctcagttgtgatcattaagagtccatttgaaaagccaggtgctcctggcaaaccaactattactgctgtcacaaaagattcttgtgttgtggcctggaagccacctgccagtgatggaggtgcaaagattagaaattactaccttgagaagcgtgagaagaagcagaataaatggatttctgtgacaacagaagaaattcgagaaactgtcttttcagtgaaaaaccttattgaaggtcttgaatacgagtttcgtgtgaaatgtgaaaatctaggtggggaaagtgaatggagtgaaatatcagaacccatcactcccaaatctgatgtcccaattcaggcaccacactttaaagaggaactgagaaatctaaatgtcagatatcagagcaatgctaccttggtctgcaaagtgactggtcatccaaaacctatcgtcaaatggtacagacaaggcaaagaaatcattgcagatggattaaaatataggattcaagaatttaagggtggctaccaccagctcatcattgcaagtgtcacagatgatgatgccacagtttaccaagtcagagctaccaaccaagggggatctgtgtctggcactgcctccttggaagtggaagttccagctaagatacacttacctaaaactcttgaaggcatgggagcagttcatgctctccgaggtgaagtggtcagcatcaagattcctttcagtggcaaaccagatcctgtgatcacctggcagaaaggacaagatctcattgacaataatggccactaccaagttattgtcacaagatccttcacatcacttgttttccccaatggggtagagagaaaagatgctggtttctatgtggtctgtgctaaaaacagatttggaattgatcagaagacagttgaactggatgtggctgatgttcctgacccacccagaggagtcaaagttagtgatgtctcacgagattctgtcaacttaacatggactgagccagcctctgatggtggcagcaaaatcaccaactacattgttgaaaaatgtgcaactactgcagaaagatggctccgtgtaggacaggcccgagaaacacgttataccgtgatcaacttatttggaaaaacaagttaccagttccgggtaatagctgaaaataaatttggtctgagcaagccttcagagccttcagaaccaaccataaccaaagaagataagaccagagctatgaactatgatgaagaggtagatgaaaccagggaagtctccatgactaaagcatctcactcttcaaccaaggaactctatgagaaatatatgattgctgaagatcttgggcgtggtgagtttggaattgtccatcgttgtgttgaaacatcctcaaagaagacatacatggccaaatttgttaaagtcaaagggactgatcaggttttggtaaagaaggaaatttccattctgaatattgctaggcatagaaacatcttacacctccatgaatcatttgaaagcatggaagaattagttatgatctttgagtttatatcaggacttgacatatttgagcgcattaacacaagtgcttttgaacttaatgaaagagaaattgtaagttatgttcaccaggtctgtgaagcacttcagtttttacacagtcataatattggacactttgacattagaccagaaaatatcatttaccaaaccagaagaagctctaccattaaaatcatagaatttggtcaagcccgtcagctgaaaccaggggacaacttcaggcttctattcactgccccagaatactatgcacctgaagtccaccagcatgatgttgtcagcacagccacagacatgtggtcacttggaacactggtatatgtgctattgagtggtatcaacccattcctggctgaaactaaccaacagatcattgagaatatcatgaatgctgaatatactttcgatgaggaagcattcaaagagattagcattgaagccatggattttgttgaccggttgttagtgaaagagaggaaatctcgcatgacagcatcggaggctctccagcacccatggttgaagcagaagatagaaagagtcagtactaaagttatcagaacattaaaacaccggcgttattaccacaccctgatcaagaaagacctcaacatggttgtgtcagcagcccggatctcctgtggtggtgcaattcgatctcagaagggagtgagtgttgctaaagttaaagtggcatccattgaaattggcccagtttctgggcagataatgcatgcagttggtgaagaaggaggacatgtcaaatatgtatgcaaaattgaaaattatgatcagtctacccaagtgacttggtactttggcgtccgacagctggagaacagtgagaaatacgaaatcacctacgaagatggagtggccatcctctatgtcaaagacattaccaaattagatgatggtacctacagatgcaaagtagtcaatgactatggtgaagacagttcttatgcagagctatttgttaaaggtgtgagagaagtctatgactattactgccgtagaaccatgaagaaaattaagcgcagaacagacacaatgagactcctggaaaggccaccagaatttaccctgcctctctataataagacagcttatgtaggtgaaaatgtccggtttggagtaactataactgtccacccagagcctcatgtaacatggtataaatcaggtcagaaaatcaaaccaggtgacaatgacaagaagtacacatttgagtcagacaagggtctttaccaattaacaatcaacagtgtcactacagatgatgacgctgaatatactgttgtggcaaggaacaaatatggtgaagacagctgtaaagcaaagctgacagtaaccctacacccacctccaacagatagtaccttaagacccatgttcaaaaggttactggcaaatgcagaatgccaagaaggccaaagtgtctgctttgagatcagagtgtctggcatccccccaccaacattaaaatgggagaaagatggtcagccactgtccctcgggcctaacattgaaattatccatgaaggcttggattattatgctctgcacatcagggacactttgcctgaagacacgggttattatagagtcacagccactaacacagctgggtccaccagctgccaggctcacctacaagtggaacgcctgaggtacaagaaacaggaattcaagagtaaggaggagcatgagcgacacgtacaaaaacaaattgacaaaaccctcagaatggctgaaattctttctggaactgaaagtgtaccactgacacaggtagctaaagaggctctgagagaagctgctgtcctttataaaccggctgtaagcaccaagactgtaaaaggggaattcagacttgagatagaagaaaagaaggaggagagaaaactccggatgccttatgatgtaccagagccacgcaagtataagcagactaccatagaagaagaccaacgcatcaagcagttcgtgcccatgtctgacatgaagtggtataaaaagatacgtgatcagtatgaaatgcctgggaaacttgacagagttgtacagaaacgacccaagcgcatccgcctttcaagatgggaacagttctatgtgatgcctcttccacgcattacagatcaatacagacctaaatggcgtattcctaaactgtcccaagatgatcttgagatagtgagaccagcccgccggcgtacaccttctcctgattatgacttttactaccgacctagaagacgttctcttggggacatctctgatgaagaattactcctccccattgatgactacttagcaatgaaaagaacagaggaagagaggctgcgtcttgaagaagagcttgagttaggtttttcagcttcacccccaagtcgaagccctccacactttgagctttctagcctacgttactcttcaccacaagctcatgtcaaggtggaggaaacaagaaaagacttcaggtattcaacctatcacatcccaacgaaggctgaagctagtacaagttatgcagaactgagggaacggcatgcccaggctgcgtacagacagccaaagcaacggcaaagaatcatggctgagagggaggatgaagagttgcttcgcccagttacgaccacccagcatctctcagaatacaaaagcgaacttgacttcatgtcaaaggaggaaaagtctagaaagaaatcaaggcgacaaagagaagtgacagaaataacagaaattgaggaagaatacgaaatctcaaaacatgctcaaagagaatcatcctcatctgcgtctagactactgagacgacggcgctccctgtctccaacttatattgagttaatgaggccagtgtctgagctgatccggtcacgtccacaaccggctgaggaatacgaagatgacacagaaagaaggtcacctactccagagagaactcgcccacgatcccccagccctgtgtctagtgagagatcactctcgagatttgagaggtctgcaagatttgatatcttttccaggtatgagtccatgaaagctgctttaaaaactcagaagacatcagaaaggaagtatgaagttttgagtcagcagcctttcacactggaccatgcccctcgaatcacactgagaatgcgctcgcacagggtaccatgtggccaaaatacacgttttattttaaatgttcagtctaagccaactgccgaggttaaatggtaccacaatggtgtggaactccaagaaagcagtaagattcattacaccaacacgagtggagtcctcaccctggaaattctggactgtcatactgatgacagtggaacctaccgtgctgtgtgcaccaactacaagggcgaagcttctgactatgcaacgttggacgtgacaggaggggattataccacctatgcttcccaacgcagagatgaagaggtccccagatctgttttccctgagctgacaagaacagaggcgtatgctgtttcatcatttaagaaaacatctgagatggaagcttcgtcttctgtcagggaagtgaaatcacagatgacggagacaagggaaagtctctcctcatatgaacactctgcatctgcagaaatgaaaagtgctgcattagaagaaaagtcactggaagaaaaatccacaaccagaaagatcaagacgactttggcagcaagaattctaacaaagccacggtccatgaccgtctacgagggcgagtctgcaaggttttcttgtgacaccgatggtgagccggtaccaactgtgacctggctgcgtaaaggacaagtgctaagtacttctgcccgccaccaagtgaccaccacaaagtacaaatcaacctttgagatctcttcagtccaggcttccgatgagggcaattacagcgtggtggtagaaaacagtgaagggaaacaagaagcagagttcactctgactattcaaaaggccagggtaactgaaaaggctgtgacatcaccaccaagagtcaaatccccagagcctcgggtgaaatccccagaagcagttaagtctccaaaacgagtgaaatctccagaaccttctcacccgaaagccgtatcacccacagagacaaaaccaacaccaacagagaaagttcagcacctcccagtctctgccccaccaaagattactcagttcctgaaagcagaagcttctaaagagattgcaaaactgacctgtgtggttgaaagcagtgtattaagggcaaaagaggtcacctggtataaagatggcaagaaactgaaggaaaatgggcatttccagtttcattattcagcagatggtacctatgagctcaaaatcaataacctcactgaatctgatcaaggagaatatgtttgtgagatttctggtgaaggtggaacgtctaaaaccaacttacaatttatggggcaagcctttaagagtatccatgagaaggtatcaaaaatatcagaaactaagaaatcagatcagaaaaccactgagtcaacagtaaccagaaaaactgaaccaaaagctcctgaaccaatttcctcaaaaccagtaattgttactgggttgcaggatacaactgtttcttcagacagtgttgctaaatttgcagttaaggctactggagaaccccggccaactgccatctggacaaaagatggaaaggccattacacaaggaggtaaatataaactctctgaagacaagggagggttcttcttagaaattcataagactgatacttctgacagtggactttatacttgtacagtaaaaaattcagctggatctgtgtcctctagctgcaaattaacaataaaagctataaaagatactgaggcacagaaagtctctacacaaaagacttctgaaattacacctcagaagaaagctgttgtccaagaggaaatttcccaaaaagccctaaggtctgaagaaattaagatgtcagaggcaaaatctcaagaaaagttagccctcaaagaggaagcttcaaaggttctgatttctgaagaagtcaagaaatcagcagcaacctccctggaaaaatccattgtccatgaggaaatcactaaaacatcacaggcatcagaagaagtcagaactcatgctgagattaaagcattttctactcagatgagcataaacgaaggtcaaagactggttttaaaagccaacattgctggtgccactgatgtgaaatgggtactgaatggcgtagagcttaccaactctgaggagtaccgatatggtgtctcaggcagcgatcagaccctaaccatcaagcaagccagtcacagagatgaaggaatcctcacctgcataagcaaaaccaaggaaggaatcgtcaagtgtcagtatgatttgacactgagcaaagaactctcagatgctccagccttcatctcacagcctagatctcaaaatattaatgaaggacaaaatgttctctttacttgtgaaatcagtggcgagccatcccctgaaatcgaatggtttaaaaacaacctgccaatttctatttcttcaaatgtcagcataagccgctccagaaatgtatactcccttgaaatccgaaatgcatcagtcagcgacagtggaaagtacacaattaaggccaaaaatttccgtggccagtgttcagctacagcttccttaatggtccttcctctagttgaagaaccttccagagaggtagtattgagaacaagtggtgacacaagcttgcaaggaagcttctcgtctcagtcagtccaaatgtctgcctccaagcaggaggcctccttcagcagtttcagcagcagcagtgctagcagcatgactgagatgaaatttgcaagcatgtctgcccaaagcatgtcctccatgcaagagtcctttgtagaaatgagttccagcagctttatgggaatatctaatatgacacaactggaaagctcaactagtaaaatgcttaaagcaggcataagaggaattccgcctaaaattgaagctcttccatctgatatcagcattgatgaaggcaaagttctaacagtagcctgtgctttcacgggtgagcctaccccagaagtaacatggtcctgtggtggaagaaaaatccacagtcaagaacaggggaggttccacattgaaaacacagatgacctgacaaccctgatcatcatggacgtacagaaacaagatggtggactttataccctgagtttagggaatgaatttggatctgactctgccactgtgaatatacatattcgatccatttaagagggcctgtgcccttatactctacactcattcttaacttttcgcaaacgtttcacacggactaatctttctgaactgtaaatatttaaagaaaaaaaagtagttttgtatcaacctaaatgagtcaaagttcaaaaatattcatttcaatcttttcataattgttgacctaagaatataatacatttgctagtgacatgtacatactgtatatagccggattaacggttataaagttttgtaccatttattttatgacattttacaatgtaagttttgaaactaactgttggtaggagaaagtttcttatggaacgaataccctgctcaacatttaatcaatctttgtgcctcaacatactgttgatgtctaagtatgcctcagtgggttgagaaaatccccattgaagatgtcctgtccacctaaaagagaatgatgctgtgcatatcacttgatatgtgcaccaatacctactgaatcagaaatgtaaggcattggtgatgtttgcatttaccctcctgtaagcaacactttaacgtcttacattttctctgatgatgtcacacaaaattatcatgacaaatattaccagagcaaagtgtaacggccaacactttgttcgctcattttacgctgtctctgacataaggagtgcctgaatagcttggaaaagtaacatctcctggccatcccttcatttaaccaagctattcaagtattcctatgccagagcagtgccaactcttggaggtcccagagtgcagccaatgcctttgtgtggtagttctaaattttaattgcacctgaaaaacctgggcacctaagcaatgagccacagcaaaaagtaaagaacaacaacaaaataaagctgttgttaaattttaaacaatattactaattgcccaaaatgtcaatttgatgtagttcttttcatgcaagtataaattcaattgttagttataattgttggacctccttgagatagtaacaacaaaataaagcaagctatctgcacctcaaaa

SEQ ID NO: 1365 - DNA, 436 bp, Artificial Sequence
  Description of Artificial sequences:primer
  misc_feature (1)..(436): 3' terminal sequence from clone image:563112. x-ray repair complementing defective repair in chinese hamster cells 5 (double-strand-break rejoining, ku autoantigen, 80kda)(XRCC5) gene.
  misc_feature (337)..(337): n is a, c, g, or t
aacaatgactctttataaacttgtatggggtctaaattatcccttgtaatatatatgtgtgtattcattccacagagaattagatgatccgcctccaggtaacctgctgggaatttcttgagattttggctccccttgaatggccgcatccaacttgttttgttagaactcccagcatcacagcgatggcagctctcttagattccccatacatccacgacctatatcatgtccaataaatcgtccacatcaccaccttcttcaaatacagctgctgtgtctccacttggtttgtctttgggggccagaaactttttggcttcctcagctgtgacangatcttccagaggcttcctctttgggtgatcagagtaattccatcctggacaacaatttcccagaaatggatttaattgtttaatttccactttctctt

SEQ ID NO: 1366 - DNA, 3310 bp, Artificial Sequence
  Description of Artificial sequences:primer
  misc_feature (1)..(3310): x-ray repair complementing defective repair in chinese hamster cells 5 (double-strand-break rejoining ku autoantigen, 80kda)(XRCC5) gene.
ggcgggcgaccaaagcgcctgaggaccggcaacatggtgcggtcggggaataaggcagctgttgtgctgtgtatggacgtgggctttaccatgagtaactccattcctggtatagaatccccatttgaacaagcaaagaaggtgataaccatgtttgtacagcgacaggtgtttgctgagaacaaggatgagattgctttagtcctgtttggtacagatggcactgacaatcccctttctggtggggatcagtatcagaacatcacagtgcacagacatctgatgctaccagattttgatttgctggaggacattgaaagcaaaatccaaccaggttctcaacaggctgacttcctggatgcactaatcgtgagcatggatgtgattcaacatgaaacaataggaaagaagtttgagaagaggcatattgaaatattcactgacctcagcagccgattcagcaaaagtcagctggatattataattcatagcttgaagaaatgtgacatctccctgcaattcttcttgcctttctcacttggcaaggaagatggaagtggggacagaggagatggcccctttcgcttaggtggccatgggccttcctttccactaaaaggaattaccgaacagcaaaaagaaggtcttgagatagtgaaaatggtgatgatatctttagaaggtgaagatgggttggatgaaatttattcattcagtgagagtctgagaaaactgtgcgtcttcaagaaaattgagaggcattccattcactggccctgccgactgaccattggctccaatttgtctataaggattgcagcctataaatcgattctacaggagagagttaaaaagacttggacagttgtggatgcaaaaaccctaaaaaaagaagatatacaaaaagaaacagtttattgcttaaatgatgatgatgaaactgaagttttaaaagaggatattattcaagggttccgctatggaagtgatatagttcctttctctaaagtggatgaggaacaaatgaaatataaatcggaggggaagtgcttctctgttttgggattttgtaaatcttctcaggttcagagaagattcttcatgggaaatcaagttctaaaggtctttgcagcaagagatgatgaggcagctgcagttgcactttcctccctgattcatgctttggatgacttagacatggtggccatagttcgatatgcttatgacaaaagagctaatcctcaagtcggcgtggcttttcctcatatcaagcataactatgagtgtttagtgtatgtgcagctgcctttcatggaagacttgcggcaatacatgttttcatccttgaaaaacagtaagaaatatgctcccaccgaggcacagttgaatgctgttgatgctttgattgactccatgagcttggcaaagaaagatgagaagacagacacccttgaagacttgtttccaaccaccaaaatcccaaatcctcgatttcagagattatttcagtgtctgctgcacagagctttacatccccgggagcctctacccccaattcagcagcatatttggaatatgctgaatcctcccgctgaggtgacaacaaaaagtcagattcctctctctaaaataaagaccctttttcctctgattgaagccaagaaaaaggatcaagtgactgctcaggaaattttccaagacaaccatgaagatggacctacagctaaaaaattaaagactgagcaagggggagcccacttcagcgtctccagtctggctgaaggcagtgtcacctctgttggaagtgtgaatcctgctgaaaacttccgtgttctagtgaaacagaagaaggccagctttgaggaagcgagtaaccagctcataaatcacatcgaacagtttttggatactaatgaaacaccgtattttatgaagagcatagactgcatccgagccttccgggaagaagccattaagttttcagaagagcagcgctttaacaacttcctgaaagcccttcaagagaaagtggaaattaaacaattaaatcatttctgggaaattgttgtccaggatggaattactctgatcaccaaagaggaagcctctggaagttctgtcacagctgaggaagccaaaaagtttctggcccccaaagacaaaccaagtggagacacagcagctgtatttgaagaaggtggtgatgtggacgatttattggacatgatataggtcgtggatgtatggggaatctaagagagctgccatcgctgtgatgctgggagttctaacaaaacaagttggatgcggccattcaaggggagccaaaatctcaagaaattcccagcaggttacctggaggcggatcatctaattctctgtggaatgaatacacacatatatattacaagggataatttagaccccatacaagtttataaagagtcattgttattttctggttggtgtattattttttctgtggtcttactgatctttgtatattacatacatgctttgaagtttctggaaagtagatcttttcttgacctagtatatcagtgacagttgcagcccttgtgatgtgattagtgtctcatgtggaaccatggcatggttattgatgagtttcttaaccctttccagagtcctcctttgcctgatcctccaacagctgtcacaacttgtgttgagcaagcagtagcatttgcttcctcccaacaagcagctgggttaggaaaaccatgggtaaggacggactcacttctctttttagttgaggccttctagttaccacattactctgcctctgtatataggtggttttctttaagtggggtgggaaggggagcacaatttcccttcatactccttttaagcagtgagttatggtggtggtctcatgaagaaaagaccttttggcccaatctctgccatatcagtgaacctttagaaactcaaaaactgagaaatttacttcagtagttagaattatatcacttcactgttctctacttgcaagcctcaaagagagaaagtttcgttatattaaaacacttaggtaacttttcggtctttcccatttctacctaagtcagctttcatctttgtggatggtgtctcctttactaaataagaaaataacaaagcccttattctctttttttcttgtcctcattcttgccttgagttccagttcctctttggtgtacagacttcttggtacccagtcacctctgtcttcagcaccctcataagtcgtcactaatacacagttttgtacatgtaacattaaaggcataaatgactc

SEQ ID NO: 1367 - DNA, 304 bp, Artificial Sequence
  Description of Artificial sequences:primer
  misc_feature (1)..(304): 3' terminal sequence from clone image:563130. cyclin b1(CCNB1) gene.
  misc_feature (26)..(26): n is a, c, g, or t
atgtacagatggcacatggtcaaatntttatttgtaaatatagtactccaactcaagtttacaagttacacctttgccacagccttggtaaatcttgaactagtgcagaattcagctgtggtagagtgctgatcttagcatgcttcgatgtggcatacttgttcttgacagtcatgtgctttgtaagtccttgatttaccatgactacattcttagccaggtgctgcataactggaagaagagattcttcagtatatgacaggtaatgttgtagagttggtgtccattcaccattatccagaat

SEQ ID NO: 1368 - DNA, 328 bp, Artificial Sequence
  Description of Artificial sequences:primer
  misc_feature (1)..(328): 5' terminal sequence from clone image:563130. cyclin b1(CCNB1) gene.
aaattgcagcaggagctttttgcttagcactgaaaattctggataatggtgaatggacaccaactctacaacattacctgtcatatactgaagaatctcttcttccagttatgcagcacctggctaagaatgtagtcatggtaaatcaaggacttacaaagcacatgacctgtcaagaacaagtatgccacatcgaagcatgctaagatcagcactctaccacagctgaattctgcactagttcaagatttagccaaggctgtggcaaaggtgtaacttgtaaacttgagttggagtactatatttacaaataaaattggcaccatgt

SEQ ID NO: 1369 - DNA, 1578 bp, Artificial Sequence
  Description of Artificial sequences:primer
  misc_feature (1)..(1578): cyclin b1(CCNB1) gene.
acgaacaggccaataaggagggagcagtgcggggtttaaatctgaggctaggctggctcttctcggcgtgctgcggcggaacggctgttggtttctgctggttgtaggtccttggctggtcgggcctccggtgttctgcttctccccgctgagctgctgcctggtgaagaggaagccatggcgctccgagtcaccaggaactcgaaaattaatgctgaaaataaggcgaagatcaacatggcaggcgcaaagcgcgttcctacggcccctgctgcaacctccaagcccggactgaggccaagaacagctcttggggacattggtaacaaagtcagtgaacaactgcaggccaaaatgcctatgaagaaggaagcaaaaccttcagctactggaaaagtcattgataaaaaactaccaaaacctcttgaaaaggtacctatgctggtgccagtgccagtgtctgagccagtgccagagccagaacctgagccagaacctgagcctgttaaagaagaaaaactttcgcctgagcctattttggttgatactgcctctccaagcccaatggaaacatctggatgtgcccctgcagaagaagacctgtgtcaggctttctctgatgtaattcttgcagtaaatgatgtggatgcagaagatggagctgatccaaacctttgtagtgaatatgtgaaagatatttatgcttatctgagacaacttgaggaagagcaagcagtcagaccaaaatacctactgggtcgggaagtcactggaaacatgagagccatcctaattgactggctagtacaggttcaaatgaaattcaggttgttgcaggagaccatgtacatgactgtctccattattgatcggttcatgcagaataattgtgtgcccaagaagatgctgcagctggttggtgtcactgccatgtttattgcaagcaaatatgaagaaatgtaccctccagaaattggtgactttgcttttgtgactgacaacacttatactaagcaccaaatcagacagatggaaatgaagattctaagagctttaaactttggtctgggtcggcctctacctttgcacttccttcggagagcatctaagattggagaggttgatgtcgagcaacatactttggccaaatacctgatggaactaactatgttggactatgacatggtgcactttcctccttctcaaattgcagcaggagctttttgcttagcactgaaaattctggataatggtgaatggacaccaactctacaacattacctgtcatatactgaagaatctcttcttccagttatgcagcacctggctaagaatgtagtcatggtaaatcaaggacttacaaagcacatgactgtcaagaacaagtatgccacatcgaagcatgctaagatcagcactctaccacagctgaattctgcactagttcaagatttagccaaggctgtggcaaaggtgtaacttgtaaacttgagttggagtactatatttacaaataaaattggcaccatgtgccatctgtaaaaaaaaaaaaaaaaaaaaaaaaaaaaaaaaaaaaaa

SEQ ID NO: 1370 - DNA, 438 bp, Artificial Sequence
  Description of Artificial sequences:primer
  misc_feature (1)..(438): 3' terminal sequence from clone image:563819. heat shock 60kda protein 1 (chaperonin)(HSPD1) gene.
  misc_feature (329)..(329): n is a, c, g, or t
  misc_feature (438)..(438): n is a, c, g, or t
tttaactttaaacaaatttttattacacaaaggttgtcacataattggatacttctctactttgtacacaattattctcactctccacagaaaggctgcttaacttctcatctggtggtggcaagcactaaaatcctgattttaacagaatagtagtaaaaatgcctcagtgatttaagttgaaagcagtacactggtacatggctcttgtacccagtatcaagaatgtacaaatgttttttattcaaaaatacaaaataaattatctgtaggcatggacaatgacagcagtaaaccattatatattttgtcaactgaaaccagtaacntgatggttatagtgattttcagccagcctttttcttcattttctccaactgacttctctgaagttattggtgaggaacactgccttgggcttcctgtcacagttcattn

SEQ ID NO: 1371 - DNA, 422 bp, Artificial Sequence
  Description of Artificial sequences:primer
  misc_feature (1)..(422): 5' terminal sequence from clone image:563819. heat shock 60kda protein 1 (chaperonin)(HSPD1) gene.
caaaagatggtgtgactgttgcaaagtcaattgacttaaaagataaatacaaaaacattggagctaaacttgttcaagatgttgccaataacacaaatgaagaagctggggatggcactaccactgctactgtactggcacgctctatagccaaggaaggcttcgagaagattagcaaaggtgctaatccagtggaaatcaggagaggtgtgatgttagctgttgatgctgtaattgctgaacttaaaaagcagtctaaacctgtgaccacccctgaagaaattgcacaggttgctacgatttctgcaaacggagacaaagaaattggcaatatcatctctgatgcaatgaaaaaagttggaagaaagggtgtcatcacagtaaaggatggaaaaacactgaatgatgaattagaaattatg

SEQ ID NO: 1372 - DNA, 2258 bp, Artificial Sequence
  Description of Artificial sequences:primer
  misc_feature (1)..(2258): heat shock 60kda protein 1 (chaperonin)(HSPD1) gene.
ggcacgaggcgacgacctgtctcgccgagcgcacgccttgccgccgccccgcagaaatgcttcggttacccacagtctttcgccagatgagaccggtgtccagggtactggctcctcatctcactcgggcttatgccaaagatgtaaaatttggtgcagatgcccgagccttaatgcttcaaggtgtagaccttttagccgatgctgtggccgttacaatggggccaaagggaagaacagtgattattgagcagagttggggaagtcccaaagtaacaaaagatggtgtgactgttgcaaagtcaattgacttaaaagataaatacaaaaacattggagctaaacttgttcaagatgttgccaataacacaaatgaagaagctggggatggcactaccactgctactgtactggcacgctctatagccaaggaaggcttcgagaagattagcaaaggtgctaatccagtggaaatcaggagaggtgtgatgttagctgttgatgctgtaattgctgaacttaaaaagcagtctaaacctgtgaccacccctgaagaaattgcacaggttgctacgatttctgcaaacggagacaaagaaattggcaatatcatctctgatgcaatgaaaaaagttggaagaaagggtgtcatcacagtaaaggatggaaaaacactgaatgatgaattagaaattattgaaggcatgaagtttgatcgaggctatatttctccatactttattaatacatcaaaaggtcagaaatgtgaattccaggatgcctatgttctgttgagtgaaaagaaaatttctagtatccagtccattgtacctgctcttgaaattgccaatgctcaccgtaagcctttggtcataatcgctgaagatgttgatggagaagctctaagtacactcgtcttgaataggctaaaggttggtcttcaggttgtggcagtcaaggctccagggtttggtgacaatagaaagaaccagcttaaagatatggctattgctactggtggtgcagtgtttggagaagagggattgaccctgaatcttgaagacgttcagcctcatgacttaggaaaagttggagaggtcattgtgaccaaagacgatgccatgctcttaaaaggaaaaggtgacaaggctcaaattgaaaaacgtattcaagaaatcattgagcagttagatgtcacaactagtgaatatgaaaaggaaaaactgaatgaacggcttgcaaaactttcagatggagtggctgtgctgaaggttggtgggacaagtgatgttgaagtgaatgaaaagaaagacagagttacagatgcccttaatgctacaagagctgctgttgaagaaggcattgttttgggagggggttgtgccctccttcgatgcattccagccttggactcattgactccagctaatgaagatcaaaaaattggtatagaaattattaaaagaacactcaaaattccagcaatgaccattgctaagaatgcaggtgttgaaggatctttgatagttgagaaaattatgcaaagttcctcagaagttggttatgatgctatggctggagattttgtgaatatggtggaaaaaggaatcattgacccaacaaaggttgtgagaactgctttattggatgctgctggtgtggcctctctgttaactacagcagaagttgtagtcacagaaattcctaaagaagagaaggaccctggaatgggtgcaatgggtggaatgggaggtggtatgggaggtggcatgttctaactcctagactagtgctttacctttattaatgaactgtgacaggaagcccaaggcagtgttcctcaccaataacttcagagaagtcagttggagaaaatgaagaaaaaggctggctgaaaatcactataaccatcagttactggtttcagttgacaaaatatataatggtttactgctgtcattgtccatgcctacagataatttattttgtatttttgaataaaaaacatttgtacattcctgatactgggtacaagagccatgtaccagtgtactgctttcaacttaaatcactgaggcatttttactactattctgttaaaatcaggattttagtgcttgccaccaccagatgagaagttaagcagcctttctgtggagagtgagaataattgtgtacaaagtagagaagtatccaattatgtgacaacctttgtgtaataaaaatttgtttaaagttaaaaaaaaaaaaaaaaaaaa

SEQ ID NO: 1373 - DNA, 468 bp, Artificial Sequence
  Description of Artificial sequences:primer
  misc_feature (1)..(468): 3' terminal sequence from clone image:564501. high-mobility group box 1(HMGB1) gene.
  misc_feature (1)..(1): n is a, c, g, or t
  misc_feature (205)..(205): n is a, c, g, or t
  misc_feature (371)..(371): n is a, c, g, or t
  misc_feature (384)..(384): n is a, c, g, or t
  misc_feature (386)..(386): n is a, c, g, or t
ntttttttttttttttttttttttaataaaaaaaattgtatttacttagaagcattcagaatgtcaacaaaacagctgcaacttttttttttttttgcaattacagagtggtattcagttaacagaacaacaattatttcgtataagctgcatcagagacaactgaagatgaaaaaactaccatccccatatataactaatttgngctgtgcccaaacaagaacctgctttaaatttccatgccaatttacaacccccatactgtaccaggcaaggttagtggctattgaaaataccaccaggacagggctatctaaagacacattcggtagtgtgttaactatacaaaaaaggacactgtacagtttaanaacaaatcttacncngccttacatttcaatttttttctttagaaggagtgagttgtgtacaggggggttaaatgctttatagacaagaaaaaaaaaa

SEQ ID NO: 1374 - DNA, 2269 bp, Artificial Sequence
  Description of Artificial sequences:primer
  misc_feature (1)..(2269): high-mobility group box 1(HMGB1) gene.
cagtacattgagctccatagagacagcgccggggcaagtgagagccggacgggcactgggcgactctgtgcctcgctgaggaaaaataactaaacatgggcaaaggagatcctaagaagccgagaggcaaaatgtcatcatatgcattttttgtgcaaacttgtcgggaggagcataagaagaagcacccagatgcttcagtcaacttctcagagttttctaagaagtgctcagagaggtggaagaccatgtctgctaaagagaaaggaaaatttgaagatatggcaaaagcggacaaggcccgttatgaaagagaaatgaaaacctatatccctcccaaaggggagacaaaaaagaagttcaaggatcccaatgcacccaagaggcctccttcggccttcttcctcttctgctctgagtatcgcccaaaaatcaaaggagaacatcctggcctgtccattggtgatgttgcgaagaaactgggagagatgtggaataacactgctgcagatgacaagcagccttatgaaaagaaggctgcgaagctgaaggaaaaatacgaaaaggatattgctgcatatcgagctaaaggaaagcctgatgcagcaaaaaagggagttgtcaaggctgaaaaaagcaagaaaaagaaggaagaggaggaagatgaggaagatgaagaggatgaggaggaggaggaagatgaagaagatgaagatgaagaagaagatgatgatgatgaataagttggttctagcgcagttttttttttttcttgtctataaagcatttaacccccctgtacacaactcactccttttaaagaaaaaaattgaaatgtaaggctgtgtaagatttgtttttaaactgtacagtgtctttttttgtatagttaacacactaccgaatgtgtctttagatagccctgtcctggtggtattttcaatagccactaaccttgcctggtacagtatgggggttgtaaattggcatggaaatttaaagcaggttcttgttggtgcacagcacaaattagttatatatggggatggtagttttttcatcttcagttgtctctgatgcagcttatacgaaataattgttgttctgttaactgaataccactctgtaattgcaaaaaaaaaaaagttgcagctgttttgttgacattctgaatgcttctaagtaaatacaattttttttattagtattgttgtccttttcataggtctgaaatttttcttcttgaggggaagctagtcttttgcttttgcccattttgaatcacatgaattattacagtgtctatcctttcatatagttagctaataaaaagcttttgtctacacaccctgcatatcataatgggggtaaagttaagttgagatagttttcatccataactgaacatccaaaatcttgatcagttaagaaatttcacatagcccacttacatttacaaactgaagagtaatcaatctactcaaagcatgggattattagaatcaaacattttgaaagtctgtccttgaaggactaatagaaaagtatgttctaacctttacatgaggactctattctttaactcccattaccatgtaatggcagttatattttgcagttcccacattaaagaagacctgagaatgtatccccaaaagcgtgagcttaaaatacaagactgccatattaaattttttgttgacattagtctcagtgaagactatgaaaatgctggctatagatgtcttttcccatttatctaaatatggactgctcaggaaacgagactttcattacaagtatttttaattaattgggccagcttttcaaacaaagatgccacattcaaaatagggtatattttcctatattacggtttgcccctttataaatccaagtagataggaagaaagaagacaaactttgcatctcagtatgaattattcaatttatttgaatgatttttctttacaaaacaaactcattcattagtcatgtttatctgcttaggagtttagggaacaatttggcaattttgtggttttcgagattatcgttttcttaaagtgccagtattttaaaatagcgttcttgtaattttacacgcttttgtgatggagtgctgttttgttatataatttagacttggattctttccatttgcatttgtttatgtaatttcaggaggaatactgaacatctgagtcctggatgatactaataaactaataattgcagtaaaaaaaaaaaaaaaaaaaaaaaaaaaaaa

SEQ ID NO: 1375 - DNA, 477 bp, Artificial Sequence
  Description of Artificial sequences:primer
  misc_feature (1)..(477): 3' terminal sequence from clone image:564535. sp3 transcription factor(SP3) gene.
  misc_feature (127)..(127): n is a, c, g, or t
  misc_feature (446)..(446): n is a, c, g, or t
  misc_feature (462)..(462): n is a, c, g, or t
  misc_feature (471)..(471): n is a, c, g, or t
tcaaaaattttatttaataagctcattcttatttactctaggtaaaaaattagtaaatgaccagtgtctctatatatctcttcttcaaataaatgcctgtttacaattcagtgtctaaaatcaagantctaaaaataaaaagccaagttgaagaaaaataaaccaccaattcttaccccataccactgcaatattttttatgcataggaatacaacaaactcaaaagaaaaaaaaatagtgttttattaactaccacactgttataatacactttaaacgtacaataaggtagcctttaaatttgaggtggtcttaagaataacaaatgaacagaattccaaatttttgaaataggtgaactgctgcagttacaggtatacatttaggaaaactgtatagctcttacaagaccagcaatggtaactttattttggtacatttttgnattggaaatataaacnataattaanggatta

SEQ ID NO: 1376 - DNA, 358 bp, Artificial Sequence
  Description of Artificial sequences:primer
  misc_feature (1)..(358): 5' terminal sequence from clone image:564535. sp3 transcription factor(SP3) gene.
  misc_feature (151)..(151): n is a, c, g, or t
  misc_feature (161)..(161): n is a, c, g, or t
  misc_feature (177)..(177): n is a, c, g, or t
  misc_feature (182)..(183): n is a, c, g, or t
  misc_feature (189)..(189): n is a, c, g, or t
  misc_feature (196)..(196): n is a, c, g, or t
  misc_feature (241)..(241): n is a, c, g, or t
  misc_feature (313)..(313): n is a, c, g, or t
  misc_feature (346)..(346): n is a, c, g, or t
tagattctgctggtatacagctacatccaggagagaatgctgacagtcctgcagatattaggatcaaggaagaagaacctgatcctgaagagtggcagctcagtggtgattctaccttgaataccaatgacctaacacacttaagagtacnaggtggtagntgaggaaggggaccancaacnncagganggaaaangacttcgaagggtagcttcacctgtcccaactgtaaagaaggtgntggaagaggtaccaatcttgggaaaaagaagcaacacatttgtcatatacccaggatgtggtaaagtctatngggaagacctcacatctgaagagctcatctgcngttggcattctt

SEQ ID NO: 1377 - DNA, 460 bp, Artificial Sequence
  Description of Artificial sequences:primer
  misc_feature (1)..(460): 3' terminal sequence from clone image:564547. glutathione s-transferase theta 2(GSTT2) gene.
  misc_feature (331)..(331): n is a, c, g, or t
  misc_feature (354)..(354): n is a, c, g, or t
catacttttactccatatgtataacacaacaatgtagtaaaaccaataactcttggttctctattcaaagtgtttggaatctttattctgtttaaaacactgatgacatttgccaatttttgagtgttcttcatgttactgatttgtaggagctctttatatattgcagatttagtctcttactggttatgtatgctgcacctgaggagtagcagcactgccaaggacactgagtgtcttgtctgtgcagagcttcacatgaagctggagagaagggactggggcaagagggaaagataaaaaggggcaagtaagtaacagaatgaatccntgttgctaatctcctggcccccntcccagacccttcaggggatcctggcgattcgaagcagcatagcctgataggcctctgggtgaggggtgttgggagggttttcttggccgcctgttccaggatgct

SEQ ID NO: 1378 - DNA, 317 bp, Artificial Sequence
  Description of Artificial sequences:primer
  misc_feature (1)..(317): 5' terminal sequence from clone image:564547. glutathione s-transferase theta 2(GSTT2) gene.
ccagccgcgccgtctacatcttcgccaagaagaatggcatccccttagagctgcgcaccgtggatttggtcaaagggcagcacaagagcaaggagttcttgcagatcaacagcctggggaaactgccgacgctcaaggatggtgatttcatcttgaccgaaagctcggccatcctgatttacctgagctgtaagtaccagacgccggaccactggtatccatctgacctgcaggctcgtgccagtgttcatgagtacctgggctggcatgccgactgcatccgtggcacctttggtatacccctgtggtccaggtgt

SEQ ID NO: 1379 - DNA, 1100 bp, Artificial Sequence
  Description of Artificial sequences:primer
  misc_feature (1)..(1100): glutathione s-transferase theta 2(GSTT2) gene.
cagctgctgcccacaccgcgtcgacgccttcactgccatccccgctgtccttgccgcccccgccatgggcctagagctgtttcttgacctggtgtcccagcccagccgcgccgtctacatcttcgccaagaagaatggcatccccttagagctgcgcaccgtggatttggtcaaagggcagcacaagagcaaggagttcttgcagatcaacagcctggggaaactgccgacgctcaaggatggtgatttcatcttgaccgaaagctcggccatcctgatttacctgagctgtaagtaccagacgccggaccactggtatccatctgacctgcaggctcgtgcccgtgttcatgagtacctgggctggcatgccgactgcatccgtggcacctttggtatacccctgtgggtccaggtgttggggccactcattggggtccaggtgcccgaggagaaggtggaacgcaacaggactgccatggaccaggccctgcaatggctggaggacaagttcctgggggacaggcccttcctcgctggccagcaggtgacactggctgatctcatggccctggaggagctgatgcagccggtggctctcggctacgaactgtttgagggacggccacgactggcagcatggcgtggacgagtggaggctttcctgggtgctgagctatgccaggaggcccacagcatcatcttgagcatcctggaacaggcggccaagaaaaccctcccaacaccctcaccagaggcctatcaggctatgctgcttcgaatcgccaggatcccctgaagggtctgggatgggggccaggagattagcaacaaggattcattctgttacttacttgcccctttttatctttccctcttgccccagtcccttctctccagcttcatgtgaagctctgcacagacaagacactcagtgtccttggcagtgctgctactcctcaggtgcagcatacataaccagtaagagactaaatctgcaatatataaagagctcctacaaatcagtaacatgaagaacactcaaaaattggcaaatgtcatcagtgttttaaacagaataaagattccaaacactttga

SEQ ID NO: 1380 - DNA, 339 bp, Artificial Sequence
  Description of Artificial sequences:primer
  misc_feature (1)..(339): 3' terminal sequence from clone image:587547. x-ray repair complementing defective repair in chinese hamster cells 5 (double-strand-break rejoining, ku autoantigen, 80kda)(XRCC5) gene.
  misc_feature (94)..(94): n is a, c, g, or t
  misc_feature (284)..(284): n is a, c, g, or t
  misc_feature (314)..(314): n is a, c, g, or t
  misc_feature (322)..(322): n is a, c, g, or t
  misc_feature (325)..(325): n is a, c, g, or t
gatgagtcatttatgcctttaatgttacatgtacaaaactgtgtattagtgacgacttatgagggtgctgaagacagaggtgactgggtaccangaagtctgtacaccaaagaggaactggaactcaaggcaagaatgaggacaagaaaaaaagagaataagggctttgttattttcttatttagtaaaggagacaccatccacaaagatgaaagctgacttaggtagaaatgggaaagaccgaaaagttacctaagtgttttaatataacgaaactttctccnctttgagggcttgcaagtaggggaacagtngaagttgnttntaattcctacctac

SEQ ID NO: 1381 - DNA, 422 bp, Artificial Sequence
  Description of Artificial sequences:primer
  misc_feature (1)..(422): 5' terminal sequence from clone image:587547. x-ray repair complementing defective repair in chinese hamster cells 5 (double-strand-break rejoining, ku autoantigen, 80kda)(XRCC5) gene.
  misc_feature (320)..(320): n is a, c, g, or t
ttcctgaaagcccttcaagagaaagtggaaattaaacaattaaatcatttctgggaaattgttgtccaggatggaattactctgatcaccaaagaggaagcctctggaagttctgtcacagctgaggaagccaaaaagtttctggcccccaaagacaaaccaagtggagacacagcagctgtatttgaagaaggtggtgatgtggacgatttattggacatgatataggtcgtggatgtatggggaatctaagagagctgccatcgctgtgatgctgggagttctaacaaaacaagttggatgcggccattcaagggganccaaaatctcaagaaattcccagcaggttacctggaggcggatcatctaattctctgtggaatgaatacacacatatatattacaagggataatttagaccc

SEQ ID NO: 1382 - DNA, 447 bp, Artificial Sequence
  Description of Artificial sequences:primer
  misc_feature (1)..(447): 3' terminal sequence from clone image:590592. crn, crooked neck-like 1 (drosophila)(CRNKL1) gene.
  misc_feature (383)..(383): n is a, c, g, or t
ttttccaaacaattaatttataaaaataacaaaacatttgtctatgaaaaaaagatcaggattcactctcatcgacgtcctcatctggatggtgctcagcatcctccttttcctgctgctgtttcttccacagtttggccatggcagggagtttgaggttaggttggttggcagcatcttctggaaagatgtaatcaaagtattcttcccagcctgcatcagacccatcatcagtctggacctttcttctcttcttgactttctctggcatgagtttgtctactctctccttatctgaagctgttccaaattcttcttcaaaacttcgccaagattccagcagcataagtctctcttccttttcttcacagtttcgcatgggntttgttagcttcttcataaatttgtctggcatttaggtcaaacttccttccttttcctgaagac

SEQ ID NO: 1383 - DNA, 326 bp, Artificial Sequence
  Description of Artificial sequences:primer
  misc_feature (1)..(326): 5' terminal sequence from clone image:590592. crn, crooked neck-like 1 (drosophila)(CRNKL1) gene.
  misc_feature (13)..(13): n is a, c, g, or t
  misc_feature (244)..(244): n is a, c, g, or t
  misc_feature (289)..(289): n is a, c, g, or t
  misc_feature (296)..(296): n is a, c, g, or t
tttgttttctganagctttgtggtttcggtgagctctcagagccgatttctagcgtccgtgccggggacaggtgtcagaggtcgactgctgcagacatggcggcctccaccgcggccgggaagcagcggattcccaaagtggccaaggtgaaaaacaaagccccggctgaggtacagataactgctgaacaactcttaagagaggctaaagaaagaagaacttgagcttcttccacctccaccntcaacagaaagatcacagatgaagaagaattaaattgaattatanaactaanggaaaagggaagactttttgaagataatat

SEQ ID NO: 1384 - DNA, 4406 bp, Artificial Sequence
  Description of Artificial sequences:primer
  misc_feature (1)..(4406): crn, crooked neck-like 1 (drosophila)(CRNKL1) gene.
ctttccgacactctttgggaagagaatctctaatgacggcaacagtggagaacctaacgttccagaaggacactttgggaaatgctgttgacaaaaacacatccagattggagctccgttcctactcccttgcacggcgccacggctcgacagagccactcgtcctcgcctggtcatcccagttccggaggctgacctggggatgcgccctggacgccctgcaccgcagtccttgcgtcgctgctagtcagcacggcgttacccacctcatccgcagctccaggacgccgcactccacgcgctgccgcaaggaggacgcgcagcctggtcaccatggaaacggtgccgcctccgtcacggctcaagcgagaggtcaaaggtcagtcctgcaagttccgcttccggttccgagatcctgtttgttttctgaaagctttgtggtttcggtgagctctcagagccgatttctagcgtccgtgccggggacaggtgtccagaggtcgactgctgcagacatggcggcctccaccgcggccgggaagcagcggattcccaaagtggccaaggtgaaaaacaaagccccggctgaggtacagataactgctgaacaactcttaagagaggctaaagaaagagaacttgagcttcttccacctccacctcaacagaagatcacagatgaagaagaattaaatgattataaactaaggaaaaggaagacttttgaagataatataagaaaaaacaggactgtgattagtaactggataaaatacgcacaatgggaagaaagcctaaaggagattcaaagggctcgatccatatacgagcgtgctttagatgtagactaccgaaatattacactctggctgaaatacgcagaaatggaaatgaagaatcgccaagtcaaccatgctcgaaatatctgggaccgggccataacaacgctgcctcgagttaatcagttctggtacaagtacacgtacatggaggaaatgttgggaaacgttgccggtgcccggcaggtgtttgagcgctggatggagtggcagcctgaggagcaagcctggcactcctacatcaactttgagctgagatacaaagaggtggatcgggcccgcaccatttatgagcgatttgtcctcgtgcaccctgatgttaagaactggatcaagtatgcccgctttgaagaaaaacatgcttattttgcccatgcacggaaagtgtatgagagagctgtggaattctttggagatgaacatatggatgagcacctttatgttgcctttgccaagtttgaagaaaatcagaaagagtttgaaagggtacgagtgatttacaagtatgccctggacagaatttcaaaacaagatgcccaagaactctttaaaaattataccatctttgagaagaagtttggtgataggcggggtattgaagatatcattgtgagcaaacggagattccagtacgaagaagaagtgaaggcgaatccacacaattatgatgcatggtttgattacttgcgcttggtagaaagtgacgcagaagctgaagccgtgagagaagtctatgaaagggccattgccaatgtcccacccattcaggagaagaggcactggaagcgctacatttatctttggatcaactatgcactctatgaagaattggaggcaaaggatcctgagaggacaagacaggtgtatcaagcctctttggaactaattcctcacaaaaagttcacatttgccaaaatgtggatactgtatgcacagtttgaaatacgacagaagaatctgtcattagccagaagagcattgggaacttccataggcaaatgtccaaagaacaaattatttaaagtttacatagaattggagctacagcttcgagaatttgacagatgccggaagctttatgaaaagttcctggaatttggacctgaaaattgtacctcatggattaaattcgctgaattagagacaatccttggtgatattgacagagcacgggcaatctatgaattagccatcagtcagccacgtttagacatgccagaggtgctttggaaatcatatattgattttgaaattgagcaggaagaaacagaaagaacacgaaacctttaccggcggttgcttcaacggacgcagcatgtcaaggtatggatcagctttgctcagtttgagttgtcttcaggaaaagaaggaagtttgactaaatgcagacaaatttatgaagaagctaacaaaaccatgcgaaactgtgaagaaaaggaagagagacttatgctgctggaatcttggcgaagttttgaagaagaatttggaacagcttcagataaggagagagtagacaaactcatgccagagaaagtcaagaagagaagaaaggtccagactgatgatgggtctgatgcaggctgggaagaatactttgattacatctttccagaagatgctgccaaccaacctaacctcaaactcctggccatggccaaactgtggaagaaacagcagcaggaaaaggaggatgctgagcaccatccagatgaggacgtcgatgagagtgaatcctgatctttttttcatagacaaatgttttgttatttttataaattaattgtttggaactcttgtgactcctggaagttcttatatatttcaccagtaagaaattgattggtatctttgatggctactttttaagttattttttaaatgctcttgggttagctaggggtagggattgcaagtaaaggacttttttaactgctggatttgtttttccaactgagtccaaacttttctaatgtctgtccacatcatgcattaggaaatgtaattaaggtaacattctacagttacttttcatgtcatacccataaagatagtttatgcattcatctgaaatgtgtaactttttcatgtcttcagagtcacagacttgagttcatttcccagctctgccactcatgattatataacttaattttcattttcctcattcacaaaatgggccaatagtttgacagctcattttgaagattacattataaaaggaatatacctggtgggtgcatagtaagtgctcagtaaattgtttgttctaagccacttttaaaaatggtttcattccttgtagaattgaatgcgagtggattaataatttaccttactttcttactagtgtccagttatattgttttttagaacaacacttggaaaataatttgcagtgattatatttctgaacaaggttcagaaaacattgtttactaagaatttagtctaataatttcagttaggcgctcatcagttctccagagtggttgagtttgtaataccttgtttaaagaataatggcttgttcacgtgtgtgctatgaaaaatgatgtcccatgttcacataaatttgggaaattctggactaagacttaagtctcgttaatcaaatctctttatagttaggcttctgtacattatgtatctccagtagcaatgttgccatattatttatttcccaaacttagtggacaatggagtcatttctacctagagtaccagtaaacatctcccagtgtgctatagtagaaaatgtctactcctcactgctgacatgttaaacttactcttggtttagagcatgtgtagaaacacctaaggtagctctatgctaaataatgaagagtagcacaagaatgaatgtatttgctgatacgttgctcacattctcaagcaaaaattcaactgcattaaccgatctgagagttttcctttaacctggactgtgtttctcaagcacattttttctttgttcactgcccaaggactagaactgtatttttaaggttgttttcccctaaaaggacctttagtaagcaaatttattattaaatgtgcacatcttattcacccaagggaataaaagctacttcgtaatgttgttactaaattttatcttgaaaataaataacagtgtttgaggacagaagaaactaggactgttgttgagataaaatctgttttcagcctgactgctttagtcactggacgagcatcagctactgcggtgtcagatcacttctcgagtagaggtctgcctagtgagtgagcaggagaacatcatcttaatagcctttggctcacccagagtcagggagagatgaaaataataggtcagaatgcaagtgacttaatcacagtcttcctagaattatctgtttatgttgcatgaatgcataagaaaaaaattctgtcatgttcccaaggtagaattgtaataagcatgtgccagtgtgaaagctggaaggaaaaaagctattctctaacaggagaacataaagattcatttctctcccaccctcaactccaccaaagtaaatcctttcgatagtaaaagtttaa

SEQ ID NO: 1385 - DNA, 450 bp, Artificial Sequence
  Description of Artificial sequences:primer
  misc_feature (1)..(450): 3' terminal sequence from clone image:592041. ubiquitin-conjugating enzyme e2c(UBE2C) gene.
ttaaaaaaggacaaaaatgcatttatttaatatacaagggctcaaccgaggcttaatttaaaagacaaaaacaaaacaaaaataccacagctcaagataaagagtcctatacagaaatcacaaaaaggacagaccatctaaggaaaaattaaaaagacgacacaaggacaggctgggcagcctgggtcagggctcctggctggtgacctgctttgagtaggtttcttgcaggtacttcttaaaagctgtggggtttttccagagctcggcagcatgtgtgttcaagggactatcaatgttgggttctcctagaaggctctggatggagagcagaatggtcctgacatcatacagggcagaccacttttccttcaggatgtccaggcatatgttaccctgggtgtccacgttggggtgatagcagggcgtgaggaacttcactgtgggcgc

SEQ ID NO: 1386 - DNA, 783 bp, Artificial Sequence
  Description of Artificial sequences:primer
  misc_feature (1)..(783): ubiquitin-conjugating enzyme e2c(UBE2C) gene.
ggcacgagcgagttcctgtctctctgccaacgccgcccggatggcttcccaaaaccgcgacccagccgccactagcgtcgccgccgcccgtaaaggagctgagccgagcgggggcgccgcccggggtccggtgggcaaaaggctacagcaggagctgatgaccctcatgatgtctggcgataaagggatttctgccttccctgaatcagacaaccttttcaaatgggtagggaccatccatggagcagctggaacagtatatgaagacctgaggtataagctctcgctagagttccccagtggctacccttacaatgcgcccacagtgaagttcctcacgccctgctatcaccccaacgtggacacccagggtaacatatgcctggacatcctgaaggaaaagtggtctgccctgtatgatgtcaggaccattctgctctccatccagagccttctaggagaacccaacattgatagtcccttgaacacacatgctgccgagctctggaaaaaccccacagcttttaagaagtacctgcaagaaacctactcaaagcaggtcaccagccaggagccctgacccaggctgcccagcctgtccttgtgtcgtctttttaatttttccttagatggtctgtcctttttgtgatttctgtataggactctttatcttgagctgtggtatttttgttttgtttttgtcttttaaattaagcctcggttgagcccttgtatattaaataaatgcatttttgtccttttttaaaaaaaaaaaaaaaaaaa

SEQ ID NO: 1387 - DNA, 485 bp, Artificial Sequence
  Description of Artificial sequences:primer
  misc_feature (1)..(485): 5' terminal sequence from clone image:592521. protein phosphatase 4, regulatory subunit 2(PPP4R2) gene.
  misc_feature (113)..(114): n is a, c, g, or t
  misc_feature (132)..(132): n is a, c, g, or t
  misc_feature (134)..(134): n is a, c, g, or t
  misc_feature (138)..(138): n is a, c, g, or t
  misc_feature (140)..(140): n is a, c, g, or t
  misc_feature (143)..(143): n is a, c, g, or t
  misc_feature (148)..(148): n is a, c, g, or t
  misc_feature (152)..(152): n is a, c, g, or t
  misc_feature (155)..(155): n is a, c, g, or t
  misc_feature (157)..(157): n is a, c, g, or t
  misc_feature (161)..(161): n is a, c, g, or t
  misc_feature (164)..(164): n is a, c, g, or t
  misc_feature (177)..(177): n is a, c, g, or t
  misc_feature (193)..(193): n is a, c, g, or t
attttagaaacaaaaatgatgaaactttatgttgtagtacttttcttcatactaaatcactgatttttgttattgcagaatgtgatggttgttagctgtgttttatccttctnnagagtaagtatatttttncnattncnagnatatnattnacnanattnaancatttaattgctnctaatatataatcctnaaaatagactgaatttatttaatatgtaattaagtgtgataacatacttgtgaacctaccattcagtccccaaagtagaatattactaataacattatctatatgttttttccattaaagagatttggattaaagagattggtgatttactgtaattttaatattgttggatttacatactgtggtggcactcattgccctgagatgccattctagatgcctttccagggtgtcctagggcataattcccatgtttggaataactactgatggctttccttatgatggaaaa

SEQ ID NO: 1388 - DNA, 1497 bp, Artificial Sequence
  Description of Artificial sequences:primer
  misc_feature (1)..(1497): protein phosphatase 4, regulatory subunit 2(PPP4R2) gene.
ggggggaggcgttccggtccccaagagacccgcggagggaggcggaggctgtgagggactccgggaagccatggacgtcgagaggctccaggaggcgctgaaagattttgagaagagggggaaaaaggaagtttgtcctgtcctggatcagtttctttgtcatgtagccaagactggagaaacaatgattcagtggtcccaatttaaaggctattttattttcaaactggagaaagtgatggatgatttcagaacttcagctcctgagccaagaggtcctcccaaccctaatgtcgaatatattccctttgatgaaatgaaggaaagaatactgaaaattgtcactggatttaatggtatcccttttactattcagcgactatgtgaattgttaacagatccaaggagaaactatacaggaacagacaaatttctcagaggagtagaaaagaatgtgatggttgttagctgtgtttatccttcttcagagaaaaacaattccaatagtttaaatcgaatgaatggtgttatgtttcctggaaattcaccaagctatactgagaggtctaatataaatgggcctgggacacccaggccacttaatcgaccaaaggtttctttgtcagcccccatgacaacaaatgggttgcctgagagcacagacagcaaagaggcaaatttgcagcaaaatgaggagaaaaatcacagtgactcttcgacctctgaatcagaagtttcctcagtgagccctttgaaaaataaacatccagatgaagatgctgtggaagctgaggggcatgaggtaaaaagactcaggtttgacaaagaaggtgaagtcagagaaacagccagtcaaacgacttccagcgaaatttcttcagttatggtaggagaaacagaagcatcatcttcatctcaggataaagacaaagatagccgttgtacccggcagcactgtacagaagaggatgaagaagaggatgaagaggaagaagaagagtcttttatgacatcaagagaaatgatcccagaaagaaaaaatcaagaaaaagaatctgatgatgccttaactgtgaatgaagagacttctgaggaaaataatcaaatggaggaatctgatgtgtctcaagctgagaaagatttgctacattctgaaggtagtgaaaacgaaggccctgtaagtagtagttcttctgactgccgtgaaacagaagaattagtaggatccaattccagtaaaactggagagattctttcagaatcatccatggaaaatgatgacgaagccacagaagtcaccgatgaaccaatggaacaagactaactatttagaaacatttagatgcagtattttacatacagttctggttttaacactgtataaaacttttgtgtaataaaatggacctttagttttacaagagaagcaggttgtaaaataaagtactttatggataattccgcaaaaaaaaaaaaaaaaaaaaaaaaaaaaaaaaa

SEQ ID NO: 1389 - DNA, 493 bp, Artificial Sequence
  Description of Artificial sequences:primer
  misc_feature (1)..(493): 3' terminal sequence from clone image:594120. pyruvate dehydrogenase kinase, isoenzyme 4(PDK4) gene.
  misc_feature (245)..(245): n is a, c, g, or t
  misc_feature (473)..(473): n is a, c, g, or t
gggttcacacacaaacattcaggaagcagcactggtgtagacccactttgatcccgtaaagtgtcctgagtgtccctcttcacatggccacttcttttgccaggttctttggttccctgcttgggatacaccagtcatcagcctcagagctcatctgataatgtttgaaggctgacttgttaaaaactggaagtttttcctaatagacctcagaagacaaagcccttttaagtagaatgatagcnatctggttcccataatccctgattaaaggagtaagaagattcaggatctcccttggaaaaggtacttttggcataccaggaccgaggaaattttggccaaggccggtaaaacccaaaaacccaggcccaaaaagggaaggcaatttcccgggggaatttaatcccatccaccaggggccgtttggggttgcagttgggaagttaatggtataaactaaaagaaggccnggtcaattaaattctcaggg

SEQ ID NO: 1390 - DNA, 1798 bp, Artificial Sequence
  Description of Artificial sequences:primer
  misc_feature (1)..(1798): pyruvate dehydrogenase kinase, isoenzyme 4(PDK4) gene.
agacttgaacttgaatctcgaaccactgcatctccgactctgcccagactcttcactccgcggcaccctcaaaccccagcccaggccggggcgcacaagccagccagcgcacctgcagtcctcgcccggacgcgccgcgccccctcggaaccaggctctgctccgagcagccttcgcccctcaagccagccacagtccccgccaggccgggtgggcgtcaagatgaaggcggcccgcttcgtgctgcgcagcgctggctcgctcaacggcgccggcctggtgccccgagaggtggagcatttctcgcgctacagcccgtccccgctgtccatgaagcagctactggactttggttcagaaaatgcatgtgaaagaacttcttttgcatttttgcgacaagaattgcctgtgagactcgccaacattctgaaggaaattgatatcctcccgacccaattagtaaatacctcttcagtgcaattggttaaaagctggtatatacagagcctgatggatttggtggaattccatgagaaaagcccagatgaccagaaagcattatcagactttgtagatacactcatcaaagttcgaaatagacaccataatgtagtccctacaatggcacaaggaatcatagagtataaagatgcctgtacagttgacccagtcaccaatcaaaatcttcaatatttcttggatcgattttacatgaaccgtatttctactcggatgctgatgaaccagcacattcttatatttagtgactcacagacaggaaacccaagccacattggaagcattgatcctaactgtgatgtggtagcagtggtccaagatgcctttgagtgttcaaggatgctctgtgatcagtattatttatcatctccagaattaaagcttacacaagtgaatggaaaatttccagaccaaccaattcacatcgtgtatgttccttctcacctccatcatatgctctttgaactatttaagaatgcaatgcgggcaacagttgaacaccaggaaaatcagccttcccttacaccaatagaggttattgttgtcttgggaaaagaagaccttaccattaagatttcagacagaggaggtggtgttcccctgagaattattgaccgcctctttagttatacatactccactgcaccaacgcctgtgatggataattcccggaatgctcctttggctggttttggttacggcttgccaatttctcgtctgtatgcaaagtactttcaaggagatctgaatctctactctttatcaggatatggaacagatgctatcatctacttaaaggctttgtcttctgagtctatagaaaaacttccagtttttaacaagtcagccttcaaacattatcagatgagctctgaggctgatgactggtgtatcccaagcagggaaccaaagaacctggcaaaagaagtggccatgtgaagagggacactcaggacactttacgggatcaaagtgggtctacaccagtgctgcttcctgaatgtttgtgtgtgaacccttgtttcctccaaaacaaacgacagcaacgaaaactccttaatcagaacactgatccaatgaggaatggagcttgtttctgtgacccaggagaacttagtgcaagactacaggagttaacagatggccagctccttattttttaatgtagaataactcctgagtttatatcaaatcctgaagaaataagcctcagttttccatctgtttttgataagaataagaaagggagtgagtgtgaagatggtggttagcagtttcg

SEQ ID NO: 1391 - DNA, 336 bp, Artificial Sequence
  Description of Artificial sequences:primer
  misc_feature (1)..(336): 3' terminal sequence from clone image:594540. similar to metallothionein-ie (mt-1e).
  misc_feature (194)..(194): n is a, c, g, or t
  misc_feature (231)..(231): n is a, c, g, or t
  misc_feature (236)..(237): n is a, c, g, or t
  misc_feature (268)..(268): n is a, c, g, or t
  misc_feature (277)..(277): n is a, c, g, or t
  misc_feature (293)..(293): n is a, c, g, or t
tccaggattaacgtgctttcttcatatctgctcattaaacaaaaaaattatcacgcataggtctctgaaagttaacagtaacatttcatactaccacagggttgtgatatgcaaatttaaaatattttaaacagaaacctttacaaaataatcctattacataagcaatatttgcatagaattatacaagtacnattatacaatatttaagcagcagcaacatatgctganatttnngactaatgaagcttggttgtggcaaggagcncaatgcacnaatacggagaggcccnactgtggcctccacactctggggcaggagtggagaagccccag

SEQ ID NO: 1392 - DNA, 555 bp, Artificial Sequence
  Description of Artificial sequences:primer
  misc_feature (1)..(555): 3' terminal sequence from clone image:595600. biphenyl hydrolase-like (serine hydrolase, breast epithelial mucin-associated antigen)(BPHL) gene.
  misc_feature (384)..(384): n is a, c, g, or t
  misc_feature (476)..(476): n is a, c, g, or t
  misc_feature (487)..(487): n is a, c, g, or t
  misc_feature (516)..(516): n is a, c, g, or t
  misc_feature (536)..(536): n is a, c, g, or t
  misc_feature (550)..(550): n is a, c, g, or t
aaagggatgcaaaagatgctgttgatttgatgaaggcgctgaagtttaagaaggtttctctgctggggtggagtgatgggggcataaccgcactcattgctgctgaaaatatccatcttacatccacaagatggtgatctggggcgccaacgcctacgtcactgacgaagacagcatgatatatgagggcatccgagatgtttccaaattggagtgagagaacaagaaagcctctagaagccctctatgggtatgactactttgccagaacctgtgaaaagtgggtggatggcataagacagtttaaacatctcccagatggtaacatctgccggcacctgctgccccgggtccagtgccccgccttgattgtgcacggtgagnaggatcctctggtcccacggtttcatgccgacttcattctaagcacgtgaaaggctccggctgcatttgatgccagaaggaaacacaactgntttggttttgngatgattcacagttagcagagatttctanatgagatgccctccgtcttngtggttcttcgtgngggag

SEQ ID NO: 1393 - DNA, 286 bp, Artificial Sequence
  Description of Artificial sequences:primer
  misc_feature (1)..(286): 5' terminal sequence from clone image:595600. biphenyl hydrolase-like (serine hydrolase, breast epithelial mucin-associated antigen)(BPHL) gene.
  misc_feature (163)..(163): n is a, c, g, or t
ttgagagtttcaaaggcatcatgttaacaggcagcaacacgatcaagccccacacgaaggaaccaccaagactggagtgtgcattctcattgtaggaagtcttctgctaacttgttgaattcatctgcaaaacgcaaatgcaggttgtgtttgccttctggantcaaatgcagccgtgagcctttcacgtgcttatgaatgaagtcggcatgaaaccgtgggaccagaggatccttctcacccgtgcacaatcaaaggcggggggcacttggacccgggggcagca

SEQ ID NO: 1394 - DNA, 1521 bp, Artificial Sequence
  Description of Artificial sequences:primer
  misc_feature (1)..(1521): biphenyl hydrolase-like (serine hydrolase breast epithelial mucin-associated antigen)(BPHL) gene.
ggatccacgtcccacgggccggacccgcggccgcgttcggaaatcagcctgagcctgagtaccgctaaggctttaatcacgggtcccgagagccctaagtcttctctttgcttgctgatctcgtaccttaatgtgcaaaagaatcacgttgggaactgaaaattcagaatcctgggcctcactcccagaggatctgatctacatgtgtggagatgcccaggaatctgctttattctcttttgtcctcccacctgtccccccatttcagcacctcggtaacctctgccaaagtggctgtgaatggcgttcagctgcattaccagcagactggagagggagatcacgcagtcctgctacttcctgggatgttaggaagtggagagactgattttggacctcagctcaagaacctcaataagaagctcttcacggtggtcgcctgggatcctcgaggctatggacattccaggcccccagatcgcgatttcccagcagacttttttgaaagggatgcaaaagatgctgttgatttgatgaaggcgctgaagtttaagaaggtttctctgctggggtggagtgatgggggcataaccgcactcattgctgctgcaaaatatccatcttacatccacaagatggtgatctggggcgccaacgcctacgtcactgacgaagacagcatgatatatgagggcatccgagatgtttccaaatggagtgagagaacaagaaagcctctagaagccctctatgggtatgactactttgccagaacctgtgaaaagtgggtggatggcataagacagtttaaacatctcccagatggtaacatctgccggcacctgctgccccgggtccagtgccccgccttgattgtgcacggtgagaaggatcctctggtcccacggtttcatgccgacttcattcataagcacgtgaaaggctcacggctgcatttgatgccagaaggcaaacacaacctgcatttgcgttttgcagatgaattcaacaagttagcagaagacttcctacaatgagaatgcacactccagtcttggtggttccttcgtgtggggcttgatcgtgttgctgcctgttaacatgatgcctttgaaactctccgcctttgaaactttctacccctcccttcaatcttatcctaaccaaatgagaataatgacatattgaaaacagcctctagcttcaggctgggcacggtggctcacagctataatctcagcactttgggaggctgaggtgggagaattgcctgagcccaggagttcaagaccagcttgtgcaatatagggagactccggctctacaaaaaagagtttttcaaaattagccaggcgaagtggcacacatctgtggtcccaggtgctcaggaagctgaggtgggaggatcacttgagcccaattcaaagctgcagtgagctgtaattgcatcactgcactccaacctgggcaacagagtaagaccttgtcttaaaaaaaaataaaaacataaaaaaaaaaaaa

SEQ ID NO: 1395 - DNA, 329 bp, Artificial Sequence
  Description of Artificial sequences:primer
  misc_feature (1)..(329): 3' terminal sequence from clone image:60204. zinc finger protein 204(ZNF204) gene.
ttctatatcatatctttattgactccttaataactactacaagctcacttgtgaatcacacctgatgtacaataaataagtcacaattctgaaccacatctatagaaacttgaattcctagtaaatataataattgaggatcttaaagctcaacaagtcaggccttccagtttttcagatgaggaaattaaggcctaaagatatgaagtgacttaccccaaagtaaaagatctagttagtaataggagctgagattgagatccatgacttttaaaacccagattcatgctctctccactaaaccatgtgatcattctaggtagtcaaca

SEQ ID NO: 1396 - DNA, 229 bp, Artificial Sequence
  Description of Artificial sequences:primer
  misc_feature (1)..(229): 5' terminal sequence from clone image:60204. zinc finger protein 204(ZNF204) gene.
atcaaagacctcacaccggagaagagccttatgaatgtaagcaatctcgaaaagcctttagcagaagcacataccttactcaacatcagagaagtcacgcaggagagaaacagtataactgcaatgactgtgagaaacctttcagcctgagttcattccttacacagcatatgagggttcagactcgagaaaaaccctacaaatatagtgaatatggacaagcttttag

SEQ ID NO: 1397 - DNA, 508 bp, Artificial Sequence
  Description of Artificial sequences:primer
  misc_feature (1)..(508): 3' terminal sequence from clone image:611075. homeo box a1(HOXA1) gene.
  misc_feature (359)..(359): n is a, c, g, or t
  misc_feature (467)..(467): n is a, c, g, or t
gtatatttatttattacagacatcctaagacccgtaaactctgctctggatcatatcactccaggatctcagagctgttcatgattgtacaggaaatggggaatatcataggctcacaaaggataactgatagaactcagtgtggtactttggggacatcaaacattgtgcgacatgcaaaagactattcacgaataacacaaaatatacattcattgtgccatccatcacattaacaattgagctgaaaatacattatatccagctaagataactgtggaaggaagaaattggtttgaataatacttttaggttctgaataacccagcacaaattttaaacagagggtggccccgagnagaaaggggtagagattggggaaagacttagcacaggaagcccgggtttctggagtttgtgctctgcagggcttcttaactggaagaaccaatccagggctacccctntgaggcatctgattggggtttaaatgagggattttttcctt

SEQ ID NO: 1398 - DNA, 403 bp, Artificial Sequence
  Description of Artificial sequences:primer
  misc_feature (1)..(403): 5' terminal sequence from clone image:611075. homeo box a1(HOXA1) gene.
  misc_feature (211)..(211): n is a, c, g, or t
  misc_feature (296)..(296): n is a, c, g, or t
tggtccaagctatggctcacagaacttcagtgcgccttacagcccctacgcgttaaatcaggaagcagacccaccaagaagcctgtcgctcccccgcatcggagacatcttctccagcgcagacttttgactggatgaaagtcaaaagaaaccctcccaaaacagggaaagttggagagtacggctaccatgggtcaacccaacgcggtgncaccaacttcactaccaagcagctcacggaactggagaaggagttccacttcaacaagtacctgacgcgcgcccgcaggtgggangatcgctgcatccctgcagctcaacgagacccaagtgaagatctggttccagaaccgccgaatgaagcaaaagaaacgtgagaaggagggtctcttgcccatctctc

SEQ ID NO: 1399 - DNA, 2530 bp, Artificial Sequence
  Description of Artificial sequences:primer
  misc_feature (1)..(2530): homeo box a1(HOXA1) gene.
gaggaagtgagaaagttggcacagtcacgccgggcttcgcaggaccaggtcactcagtgacagatggacaatgcaagaatgaactccttcctggaataccccatacttagcagtggcgactcggggacctgctcagcccgagcctacccctcggaccataggattacaactttccagtcgtgcgcggtcagcgccaacagttgcggcggcgacgaccgcttcctagtgggcaggggggtgcagatcggttcgccccaccaccaccaccaccaccaccatcaccacccccagccggctacctaccagacttccgggaacctgggggtgtcctactcccactcaagttgtggtccaagctatggctcacagaacttcagtgcgccttacagcccctacgcgttaaatcaggaagcagacgtaagtggtgggtacccccagtgcgctcccgctgtttactctggaaatctctcatctcccatggtccagcatcaccaccaccaccagggttatgctgggggcgcggtgggctcgcctcaatacattcaccactcatatggacaggagcaccagagcctggccctggctacgtataataactccttgtcccctctccacgccagccaccaagaagcctgtcgctcccccgcatcggagacatcttctccagcgcagacttttgactggatgaaagtcaaaagaaaccctcccaaaacagggaaagttggagagtacggctacctgggtcaacccaacgcggtgcgcaccaacttcactaccaagcagctcacggaactggagaaggagttccacttcaacaagtacctgacgcgcgcccgcagggtggagatcgctgcatccctgcagctcaacgagacccaagtgaagatctggttccagaaccgccgaatgaagcaaaagaaacgtgagaaggagggtctcttgcccatctctccggccaccccgccaggaaacgacgagaaggccgaggaatcctcagagaagtccagctcttcgccctgcgttccttccccggggtcttctacctcagacactctgactacctcccactgaggcggctccagccccagacaacagcccaggcatctccttgggctgggacttcttacccaaagcacatgcttagcttatctttctttccatttacagtctctttcttcctttctaatcctatctggggagctcctggccaggataatatatttgcagataattctggaccagagacttggtgcggggttaacaccttcatccagattgggtgccagcatacattttctggtgggccttaacatccctcctgcttttaggagaattcacagaacctactgttcctttcagatgaccttttggaaaatagttccctttgccaacagaaacatgccagaaggaatcttctcatcttttatctaactatatgtacagctctcccctcccttgtccttgaaagtaggatatagcgaaaggcgagtccaggagctcaggaagaagagatgcactatatgtttacacaattaattcatcccttaatttaagtcattttcatgtgtgtgagtttgctggttgtaaatactttgtcctaagagatttatctttatacagattttctagaaatgtttaggttactaaaacagggtgggcaaactctctaaactggtacaattttataggtgaaagaaaaaattccctcatttaaacccaatcagatgcctcagagggtagccttgatttgttcttacagttaagaagccctgcagagcacaaacttcagaaacccggcttcctgtgctaagtctttcccaatctctacccctttcttctcgggccaccctctgtttaaaatttgtgctgggttattcagaacctaaaagtattattcaaaccaatttcttccttccacagttatcttagctggatataatgtattttcagctcaattgttaatgtgatggatggcacaatgaatgtatattttgtgttattcgtgaatagtcttttgcatgtcgcacaatgtttgatgtccccaaagtaccacactgagttctatcagttatcctttgtgagcctatgatattccccatttcctgtacaatcatgaacagctctgagatcctggagtgatatgatccagagcagagtttacgggtcttaggatgtctgtaataaataaatatactcaagtttcaggtatgcttaagcatccgtgtatttggctgggctacaatttgttaattcctatgaagttggcacatttcatgaggggaaagggagaagggtggtaaatattttcaaagagatgggccttttcttgaataaaagttaataacagctcctttattataatcaaagctcataatggaaaaaaagactgatgaagaaatttatgaagcagatttatttttgaaacaaacatggatacttcctgggtcaagtgctaaccttttcacctccaactggatgttgacgtatatataaacagaactcccttcaaaagccaaaaaaaaaaaaaaaa

SEQ ID NO: 1400 - DNA, 361 bp, Artificial Sequence
  Description of Artificial sequences:primer
  misc_feature (1)..(361): 3' terminal sequence from clone image:611123. chromosome 22 open reading frame 19(C22ORF19) gene.
ttttttttcaggtgacgctttttaattggctggtgtctttggagaatatcaagagtcacatgtgggccagagcagaaagcagaagcccagtgctcagggtgaggccttgggggaaacaacggtctgcgcgggagatcagcgatggctgaagaatccctgaggatggttgtatttaaatggcttcatcctgctaggacccctgaagagccgcagacacatcttctcctggggaaattccttgggcccctccacactgtcgtcatggctctcggtctccaggtaaacatccagcagcacacacagccgctgcagcttggttggggtaaacagctgggttggctggggccaagggcaacaaaaa

SEQ ID NO: 1401 - DNA, 477 bp, Artificial Sequence
  Description of Artificial sequences:primer
  misc_feature (1)..(477): 5' terminal sequence from clone image:611123. chromosome 22 open reading frame 19(C22ORF19) gene.
  misc_feature (17)..(17): n is a, c, g, or t
  misc_feature (21)..(21): n is a, c, g, or t
caaagggcgcccctggntggnggtctgacccggcttctcctccctcactacccgcggtccccggcctctcggcgctgcgctgttacctcatccgaaaagtgttcgctgcagcatcctcaggcttcacgttggagcctcttgattgtggtgttcagcattatttaagatcacctatgcatcatctgaagccacagtcccaggtcatcttcatcaccttccccagtggaatgcctcctgtgttaaagcccacaacaacccctgtggaggaacaaccatgtcatcagaatcgagcaaaaaacggaagcccaaagtgatccgaagcgatggagccccagctgaaggaaagcggaatcgatctgacaccgagcaggaaggtaaatactacagtgaggaggccgaggtggatctgcgggaccctggcagagactatgagttatacaagtacacctgccaggagctacagaggctgattggcct

SEQ ID NO: 1402 - DNA, 4685 bp, Artificial Sequence
  Description of Artificial sequences:primer
  misc_feature (1)..(4685): chromosome 22 open reading frame 19(C22ORF19) gene.
ccggcagtggcttactcccggtgccaggttcttggagctgtgaggaggaacaaccatgtcatcagaatcgagcaaaaaacggaagcccaaagtgatccgaagcgatggagccccagctgaaggaaagcggaatcgatctgacaccgagcaggaaggtaaatactacagtgaggaggccgaggtggatctgcgggaccctggcagagactatgagttatacaagtacacctgccaggagctacagaggctgatggctgagatccaagacctgaagagcaggggtggcaaggatgtggcaatagaaatagaagaacggaggatccagagctgtgtgcatttcatgactctaaagaagcttaaccgattagcccacatcaggttgaagaaaggaagagatcagacccacgaggctaagcagaaagtagatgcctatcatctgcagctccagaacctgttgtatgaggtgatgcacctacagaaggagatcaccaaatgtttggagtttaagtcaaagcatgaagaaattgatctggtcagtttagaggagttttataaggaggctccaccagatatcagcaaggccgaagtcaccatgggagaccctcaccagcaaacactggcacgtctggactgggagctggagcagcggaaaaggctggcagagaagtaccgagagtgcctatctaacaaggagaagattctcaaggagattgaggtgaagaaggagtacctgagcagcctccagccccgcctcaacagcatcatgcaggcttcccttccggtgcaggagtacctgtttatgccattcgaccaggctcacaagcagtatgagacagccagacacctgccgcctcccctctatgtcctctttgttcaggccactgcgtatgggcaggcctgtgataagacgttatctgtggcaatcgaaggcagtgtggatgaagccaaggctctgttcaaacctccagaggactcccaagatgacgagagtgactcagatgccgaggaggagcagactacgaagcgccggagacccacactgggggttcagttggacgacaaacgcaaggagatgctgaagaggcacccactgtctgtcatgctcgacctgaagtgcaaagatgacagtgtgcttcacctgactttctactacctcatgaacctcaacatcatgacagtaaaagccaaagtgacaactgccatggagctgatcacccccatcagtgcaggtgacttgctgtctcctgactcagtcctgagttgcttgtatcctggggatcatggaaagaaaactccgaatccagccaatcagtatcagtttgataaagttggcatcctgactttgagcgactatgtacttgagctaggtcacccctatttgtgggtgcagaagctgggtggcctccacttccccaaagagcagccccagcaaacagtgattgctgaccactcgctgagcgccagccacatggagaccaccatgaaacttctgaagaccagggtgcagtcccgcctggccctccacaaacagtttgcatccctagaacatggcattgtgccagttaccagtgattgccagtacctcttccctgccaaggttgtctctcgcctggtgaaatgggtgacaattgcccatgaggattacatggagctgcacttcaccaaagacattgtggatgcgggactggctggggacaccaatctctactacatggcgctcatcgaaaggggcacagccaaactgcaggccgctgtggtgttgaaccctggctactcctccatcccacctgttttccagctctgtttgaactggaaaggggagaaaaccaacagcaacgatgacaacattcgggccatggagggcgaagtcaatgtgtgctacaaggagctgtgtggcccttggcccagccaccagctgttgaccaaccagctgcagcggctgtgtgtgctgctggatgtttacctggagaccgagagccatgacgacagtgtggaggggcccaaggaatttccccaggagaagatgtgtctgcggctcttcaggggtcctagcaggatgaagccatttaaatacaaccatcctcagggattcttcagccatcgctgatctcccgcgcagaccgttgtttcccccaaggcctcaccctgagcactgggcttctgctttctgctctggcccacatgtgactcttgatattctccaaagacaccagccaattaaaaagcgtcacctgaccagtggcctttgtctgtggttcctggcaaggtggctttgcagtctggaagggcaggtgggagctgtgacacagtgtgaaaaagcatttgtagagagactttttctcagcagccaataaaagcagagtggaaaaagattccaattctgcagagagatgctcacctcttgtctacgcacaccctatttgtgctttgcggggtgaggtcctcatgatcttgtatttattatcccaagttcctgctgttaagaggtggtaggagaagccaaaggcagcagagcacaaaaagcaaaactcttccctccccacccgctcttcccattagtcctgtcagggttgccgatggacaaattgtctctgatcgttggatgttataaatgtctgacagtgcagtgcaaacagaagacaaactcagttgatccttgaacaactcaggggttaggggcaccaacaccccctgccctgcacagttgaaaaatccgtgtataacttttgactccctaaaaacttaactaatagcctgctgttgaccagtagtatgctattagtagttacttactgctaacatagtcagtacatattttcagtatatattttgtatcttatacactgtattcttacaatacagtaaactagagaaaagaaaatgttataaggaaagtcacaagggggcctgagtgcagtggctcacgtctgtaatcccagcactttgggaggccaaggcgggtggatcacttgaggtcaggagtttgagaccagcctggccgacatggtgaaaccctgtctctactaaaaacatggaaattagccaagcgtggtggcgcatgcctgtggtcccggttactcaggaggctgaggcagaattgcttgaacccatgaggcggaggttgcagtgagccgagatcacgctcctgcgctccggcttgggcgagagtgagactccgtctcaaaaataaataaataagaaagccataaggaagaaaatatatatctactattaagtagaagtggatcaccataaaggtcttcacatactgtctcagggttgaatagtctaaggaagaggaggggttggtcttggtgtctcagggatggcagaggcagaaaaagtgggggaggtggagggggaggcaggcaccactgttatttttattgaacaaaatctgtgcagggactcatgactgtaatcctagtactttggaaggctaaggcgggaggatcccttgaggccaggagttcgggtccggcctgggcaacgtagtgagagaccctgtatctacaaaaaatttaaaaatcagccaggtgtggtggtatgcaccagtggtcccagttactcggaaggctgaggtgggcggatgactggagtccaggagttcaaggtggcagtgagctattcatcgtgcctgtactgtactccagcctgggaaacaatgcgagtccctatctctaaaaaattttaaaaaaagaaatctgcatataatagacccacagagtccaaactattgttcagagatcaactgtacttcacagagagtaattctaagtcttacaggatttcatggagatggcgagagtggtgttggagaatcaatcacatacagagatacaggacagtgagaccaggtaacatttgaggagaatattttttttttattgagacggggtcttgctctgttgtccaggctggagtgcagtggcacgaacacggctcactgccgcctcaacctctcctgggttcaggtgatcctcctgcctcagcctcccgagtggctgggaccgcaggtgtgtgccaccatttctggctagtttttggattttttgtagaggcgggatcccactatttttcccaggctggtctcgaactcctgggctcgggtgatcctcccacctcggcctcccaaagtgctaggattataggcatgagccaccacacccggcctgagtagagtctttaaggtaatgacaaaagtgcctcaaaatataattatttgattaagagaagtcttgggaagataggtaacaacctttaaaatgttcataaaattacatcctttgtaatactcctgcaagtcaaagtaaaggatggcatagactattcttggacagttttgtcaaaaagtgtatcttgaccccaccatcagtactccattcttcattttaaaaaataagatgggctgggcacagtggcttacgcctttaatatcagtactttgggaggctggtgggcggatcgcctgagatcaggagttcgagaccggcctggccaacatggtgaaaccccgtctctactaaaagtgcagaaattggctgggcatggtggtgcgcgcctgtggtcccagccgctcgggaggctgaggcaggagaattgcttgaatccccgaggcggaggttgcactgagccgagatggtgccactgcaccatctggacaacagagcaagactccgtcttgg

SEQ ID NO: 1403 - DNA, 409 bp, Artificial Sequence
  Description of Artificial sequences:primer
  misc_feature (1)..(409): 3' terminal sequence from clone image:611255. myogenic factor 6 (herculin)(MYF6) gene.
  misc_feature (328)..(328): n is a, c, g, or t
  misc_feature (394)..(394): n is a, c, g, or t
  misc_feature (409)..(409): n is a, c, g, or t
tttttttgttcatatagaaacttctttttaatattacaataccaggatcctcgcacattttatatacatcattccacatttaaaatatatttcaggtttacgtaaaaaaagaaagtgttaaactatttacaaaaatacattaaatacccctaacattaaatgcaactttcccactttagacaggaatgaacttcttttgaacatggcacaaaaggatcaccgtaataaaagttaatatagtataaaaccaaccaaacaaaaacaaaatgaggctagacctaagccactcgcagttccaaaaaaataaaagcccaaagccgaaagggtnttccatttgagcatgcacaacagatttcgcaattttcgcaacggtttccttggtggaatgtggtcncccttccctttcagn

SEQ ID NO: 1404 - DNA, 255 bp, Artificial Sequence
  Description of Artificial sequences:primer
  misc_feature (1)..(255): 5' terminal sequence from clone image:611255. myogenic factor 6 (herculin)(MYF6) gene.
  misc_feature (188)..(188): n is a, c, g, or t
  misc_feature (221)..(221): n is a, c, g, or t
  misc_feature (223)..(223): n is a, c, g, or t
  misc_feature (255)..(255): n is a, c, g, or t
tcagaggccaaggaggagaacatgatgatggacctttttgaaactggctcctatttcttctacttggatggggaaaatgttactctgcagccattagaagtggcagaaggctctcctttgtatccagggagtgatggtaccttgtccccctgccaggaccaaatgcccccggaagcggaagcgaccanagccggagaggaacatgtcctggcgcccccggncntgcagcctccacactgccccggccaagttgtn

SEQ ID NO: 1405 - DNA, 1294 bp, Artificial Sequence
  Description of Artificial sequences:primer
  misc_feature (1)..(1294): myogenic factor 6 (herculin)(MYF6) gene.
gtttttgagtccatcacccagttcagatcgagtcagaggccaaggaggagaacatgatgatggacctttttgaaactggctcctatttcttctacttggatggggaaaatgttactctgcagccattagaagtggcagaaggctctcctttgtatccagggagtgatggtaccttgtccccctgccaggaccaaatgcccccggaagcggggagcgacagcagcggagaggaacatgtcctggcgcccccgggcctgcagcctccacactgccccggccagtgtctgatctgggcttgcaagacctgcaagagaaaatctgcccccactgaccggcgaaaagccgccaccctgcgcgaaaggaggaggctaaagaaaatcaacgaggccttcgaggcactgaagcggcgaactgtggccaaccccaaccagaggctgcccaaggtggagattctgcggagcgccatcagctatattgagcggctgcaggacctgctgcaccggctggatcagcaggagaagatgcaggagctgggggtggaccccttcagctacagacccaaacaagaaaatcttgagggtgcggatttcctgcgcacctgcagctcccagtggccaagtgtttccgatcattccagggggctcgtgataacggctaaggaaggaggagcaagtattgattcgtcagcctcgagtagccttcgatgcctttcttccatcgtggacagtatttcctcggaggaacgcaaactcccctgcgtggaggaagtggtggagaagtaactgagcctgcgcttgagaccttctccacgcagcaggaagatcccaccgacccttcctggcctaatcctttagattaggtcacattacattaacatttaggaacccagaccgaaaagttgctgaaagggaaggagacacattcacaaagaaaagttgcgaaaattgcgaaatctgttgtgcacgctcaaatgaaaacgcctttcggctttgggcttttatttttttggaactgcgagtggcttaggtctagcctcattttgtttttgtttggttggttttatactatattaacttttattacggtgatccttttgtgccatgttcaaaagaagttcattcctgtctgaagtgggaaagttgcatttaatgttaggggtatttaatgtatttttgtaaatagtttagcactttctttttttacgtaaacctgaaatatattttaaatgtggaatgatgtatataaaatgtgcgaggatcctggtattgtaatattaaaaagaagtttctatatg

SEQ ID NO: 1406 - DNA, 446 bp, Artificial Sequence
  Description of Artificial sequences:primer
  misc_feature (1)..(446): 3' terminal sequence from clone image:611623. kiaa1181 protein(KIAA1181) gene.
tctgaaaatcagccttttaatctagttgaacccaacgagtggggaaagaactaaaacatttttttcccttcagattttgattataagaataacgggtcagaggtgtctcttccataggaaactgacatcccctatgtcctcagagttgtttttttttttttttcttcaaaaaaatgcataaaagaatttcaactcatgtgcatgccacacatttccatccccaccccaccctgccccaccctctacaggcacacatattcacacaccaaagggactccttcctgtaactggggaacagaatgtaaaaaaatccatccaagtggccaccgataccagaaataaccaaatgcatttacactcacaacatcagtcaactcacatgcacaaggagaagcgtctccaatcggagcttagagccaaaaattacaaatggcagagacttgagc

SEQ ID NO: 1407 - DNA, 3969 bp, Artificial Sequence
  Description of Artificial sequences:primer
  misc_feature (1)..(3969): kiaa1181 protein(KIAA1181) gene.
gaagcccaggctctccttagttgactgtgtgttaatcacccagcaatttcattactcaacagctctccagagttgcacattacagctggggtagaaattgggtgctgaaggccaggcagagcatttggctgtagggaggccgatcctcctcgggcctgttaccggcgggtctttgttcttagacctggggttcttggcctcacggattccaaggaatggaacgttgggccatgcgtgtgaacgagctctatgtcgatgacccagacaaggacagcggtggcaagatcgacgtcagtctgaacatcagtttacccaatctgcactgcgagttggttgggcttgacattcaggatgagatgggcaggcacgaagtgggccacatcgacaactccatgaagatcccgctgaacaatggggcaggctgccgcttcgaggggcagttcagcatcaacaaggtatggaagccctgcctcagccctttctacctgctcccctttcctgctgtctccccgctccctggaaactggttgtggaggcactcactcgacctgaccctgacacagcccccagcaagcgagggttcgtgtccagctgcctggccgttcctgctgagaatctggatgggggtccaggctccctggggttttaagcccctgatggctggttcaggaaggagctactcttctctccagtgagggggacaatgatgagaagacctgaggatttgcagcccccagccctgggttcaagtcccagctctaccccttcttggcccctacaagtcacttgacccatcttaggctgagggtgtgatggcgataatagtatcacgataccacccacttcacaaagtttgtgtggggattaaatgagctaatgcagattcattcattcagaaaaatttttgaatggcacgttctgtgttccagggtcggtgataggctctggggcagcgttcctgggctggtggggctcccattctggtagagggagacagtctacaaaccagaaagcatcagggatgctaagtgcagtgatgaggaataaagccaaggggagtgagatgaggtgggcttgaaagtaccttgtccgctcagaaggaccattcaaggttcactgttgttttgtcctcagaaccaggagcttcagatcctaagtcaagtgggtgaacgcagtgcccttgggagggccgaggcacccggtggcagctggcagggttttgctcagcacgtgccggccttcctcgaagctcggtactgtcacagtggagcctctcaacaacgctgtgaggcagcaccatttgacaggttaggatgctggggcccagagaggttaagtgtcttgcccgaggtcacacagctatctgcatgtcccacaactccccttcccagccccagccaaactgagccactggccactcctggcttctccttgtccctcctgcagcctctgctcagaacgcccttcctccagaccctgacacctgagctggggttgcaaagtcactggccacatccagcccaaagataaattttgtttgtccagtatagcatttaactgcatcagaaccagtatgaaaagaccaggaatccagatttctggcttttaaaagtcagaggctctcactacactgggtccgtgttcccgctatgacaatgacctggcaccaatgggcagtgttcccctttagagagggtgtgtgctgtcccttcccacagtccctggcaggcggctggaaggccaggcctggtcatctgtcaagcagggtggacttcttacgtgacagttcagggctcccttaagtgctaaagcagaagctgcaaggctttcttaaggtttcgagtgttgctgggagaaatctgctgcatgttgtgggttaaagggagtctctcaccagcccaggccctcaggaggaggagataccaggaggcagggatgctgggggtcgtggttcactgggggctctctctgcccatgagctgccacacagcacctttgccatgccccgtaatttggattttatggtggttgtgatggaaagccatttgagggttttgaacagggaggcaatgtaatcagatttatgccttagaactggactatccaataggttgccaccagccacataaggctatttaaattaattcaaattaaatgtacaattcagtcactcattctcatcaaccacatttcaagtgctcaaagccacgtgctggctaggggccacagcgttagacagtgcagagagaaagcacttccatcgctgaggaaagttctgctggaccgcacacccttagaaggatggctctggtggccgggcgcggtggctcaaacctgtaatcccagcactttgggaggccgaggtgggtggatcacgaggtcaggagatcgagaccatcccggctaacatggtgaaaccctgcctctactaaaaatacaaaaaaaaacaaaattagccgggcgtggttgcgggcacctgtagtcccagctactcaggaggctgaggcgggagaatggcatgaacccgggaggtggagcttgcagtgagccaagatcgtaccactgcactccagtctgggcgacagagtgagactccatctcaaaacaaacaaaaaaaggatggggctgggctggagagggtggcaggcagtggttgtggcagtggagctggggagatgtggtcggattagggaggtagaatcaataagactcagtgaagaatcggatgtgggggtaagggcacatgtggaagcaaagaaacctttgacgtctttgtcttgacaaccgggtggtcctgtttctagacatggaagcttagaaaagcctggagtctgtgggaagtaggtagggctgggcactggtcattccactctggtttcctttggggttcccattaggtgtctacagggagaggtgaaattggaagttggaggtgtggagagttcaggagagggttctggaccacagatgttgaggtgggagtcattagtgaatagatgatgttggaagtcatgggtcctcagagtgggggctccttaagcctccaggccagcagcatcagcatcacctgggagattgttaggaatgcagattctcaggcccccctaagacccaccgactctgtgctagaacaagcgcccctcagagattctgatgccactgaagtttgaggagcattggtttaagcaagattacctacggagaggctgtagatccgtgttctaaacctggggtccacagacacccccaagaagagcggattgaatgcaagagatctatgaagttggatgggggaaaaattgacatctttatttttgctaaactcgatctaaagtttagcatttccatctgcgatgaatgtaggccacaaaccacagtagtattagcagtgcctgggacctcctcaacaacagaaattgccggtatttatagcacgttacagttgttgcagataatttccagagactgtttatatgcaccactgttttaaaattacggtgattggccaggtgcagtggctcacacctgtaatcccagcactttgggaggccaaagtgggtggatcacttgaggagttcaagaccagcctggtcaacatgtcaaaaccctgtatctacaaaaaaatacaaaagttaaccaagcctatgcttgtagtcacagctactcgggaggccgaggtgggagggtcttctgagcccagggaggtagaggcttcagtgagctgagatcgcaccaccacactccagcctgggtgacagagtgaaacccttaatcaatcagtcaataaaaattacagtaattattagacccaccactaggtcatcttatttgatgcatcagtaaagcagcatattcaaatgtggatttttaaatattttaattactatttaaatatctctttactttgtaatcctatgcattttacgcattaaaacattttaagcatttaaaaaaaaaaaaaaaaaaaaa

SEQ ID NO: 1408 - DNA, 386 bp, Artificial Sequence
  Description of Artificial sequences:primer
  misc_feature (1)..(386): 3' terminal sequence from clone image:611660. adenosine monophosphate deaminase 1 (isoform m)(AMPD1) gene.
  misc_feature (312)..(312): n is a, c, g, or t
  misc_feature (316)..(316): n is a, c, g, or t
  misc_feature (326)..(326): n is a, c, g, or t
  misc_feature (337)..(337): n is a, c, g, or t
  misc_feature (339)..(339): n is a, c, g, or t
  misc_feature (364)..(364): n is a, c, g, or t
  misc_feature (375)..(376): n is a, c, g, or t
  misc_feature (378)..(379): n is a, c, g, or t
ggtttacttttttttattctgttgatttaagaccctcagcaattaaattgagttcataacaccaggtttcatagcgataggccatgcggatttgggctacatttgtcctccggatatcatttccagcagggccttcctcaaggtaattgtcgcccagaaactttactttctcctcatgagaaattccacactgcaagacactgttccttgccacttcgcacatatcacaggtgctcagcttgaagacttgtgcagcaatagcatattcttccattaggggctccttggtaaagtggaattgcattgggtcanccgnagacacgtgngatcattagcncnttctcgtgaggggatccccaaaaangggttttgggnnannctctaga

SEQ ID NO: 1409 - DNA, 2341 bp, Artificial Sequence
  Description of Artificial sequences:primer
  misc_feature (1)..(2341): adenosine monophosphate deaminase 1 (isoform m)(AMPD1) gene.
ttttatagtgtcagtcagtcaccccacagtctcctctctcttcttttctactgtgctatcctagaatcaaggatttcagcaacaatgcctctgttcaaactcccagctgaagagaaacaaattgatgatgcaatgcgcaactttgctgaaaaagtgtttgcctctgaagtcaaagatgaaggaggtcgtcaggagatttccccctttgatgtggatgagatctgtccgatttctcatcatgagatgcaagcacacatattccatctggagactctgtccacctccacagaagccaggagaaaaaagcgtttccaaggacggaagactgttaatttgtccattccactaagtgaaacatcttccaccaaactgtcccacattgatgaatacatttcctcatctccaacctaccagaccgtgcctgattttcagagagtgcagattactggtgactatgcctctggggttacagttgaagattttgaaattgtttgcaaaggtctgtatcgggcactatgcatacgtgagaaatacatgcagaagtcgtttcagaggttccctaaaaccccttccaaatacttgcggaacattgatggtgaggcttgggtagcaaatgagagcttctatccagtctttactcctcctgtgaagaagggagaggaccccttccgaacagacaaccttcctgaaaacctgggctatcacctcaaaatgaaggacggtgtagtttacgtctatcctaatgaagcagcagtcagcaaagatgagcctaagccacttccttacccaaatctggacaccttcttagacgatatgaattttttacttgctttaattgctcaaggacctgttaagacctatacccaccggcgcctgaagttcctctcctccaagttccaggtccatcagatgcttaacgagatggacgagttaaaggagctgaaaaacaacccccaccgagatttttataactgcaggaaggtggacacccatatccatgcagccgcttgcatgaaccagaaacatctgctgcgttttattaagaaatcttaccaaattgatgctgacagagtggtctatagcaccaaagagaagaatctgaccctaaaggaactttttgctaaattaaaaatgcatccttatgacctgactgttgattctctggatgttcatgctggacgccagaccttccagcgttttgataagttcaatgacaaatataatcctgtaggagcaagtgagctacgggacctctacttgaagacagacaattacattaatggggaatattttgccactatcatcaaggaggtaggtgcggacctggtggaggccaagtaccagcatgctgagccccgcctgtccatctatggccgcagtcctgatgagtggagcaaactctcctcctggttcgtctgcaatcgcatccactgccccaacatgacatggatgatccaggttcccaggatctatgatgtgttccgttccaagaatttccttccacattttggaaaaatgctggagaatattttcatgccagtgtttgaggccaccatcaacccccaggctgacccagaactcagtgtcttcctcaagcatatcactggctttgacagtgtggatgatgagtccaaacacagtggccacatgttctcctccaagagtcccaagccccaggagtggacattggaaaagaatccatcttacacttactatgcctactacatgtatgcaaacatcatggtgctcaacagcctgagaaaggaacgaggcatgaatacgtttctgttccgacctcactgtggagaagctggagccctcacccatctcatgacagcattcatgatagcagatgatatctctcatggcctaaatttaaaaaagagtcccgtgctacagtacttgtttttcttagcccaaattcccatcgccatgtcaccactaagtaacaatagcctatttctagagtatgccaaaaatccttttttggatttccttcagaaagggctaatgatctcactgtctacagatgacccaatgcaattccactttaccaaggagcccctaatggaagaatatgctattgctgcacaagtcttcaagctgagcacctgtgatatgtgcgaagtggcaaggaacagtgtcttgcagtgtggaatttctcatgaggagaaagtaaagtttctgggcgacaattaccttgaggaaggccctgctggaaatgatatccggaggacaaatgtagcccaaatccgcatggcctatcgctatgaaacctggtgttatgaactcaatttaattgctgagggtcttaaatcaacagaataaaaaaaagtaaacc

SEQ ID NO: 1410 - DNA, 520 bp, Artificial Sequence
  Description of Artificial sequences:primer
  misc_feature (1)..(520): 3' terminal sequence from clone image:611783. troponin t3, skeletal, fast(TNNT3) gene.
  misc_feature (3)..(3): n is a, c, g, or t
  misc_feature (63)..(63): n is a, c, g, or t
  misc_feature (411)..(411): n is a, c, g, or t
  misc_feature (450)..(450): n is a, c, g, or t
  misc_feature (495)..(495): n is a, c, g, or t
gcntatctctggcatctctacttccagcgcccgccgactttgcccttggtggggtcccagctntcttgctgtgcttctgggcctggtcaatgcggctcctgagcgtggtgatgtcatatttctggcgtttcagcttctccccaaactcgaacttgtcaatctccagctggtgcagggtctcccagagctccttggccttgtccctcagtttgtcttcaccaaggtgatcgatgttgagcggcttgcgtctctcagccagaatcttcttcttcatttcccgggctgtctgcttcttgcctctcttctggtcagccttggccaaggtagctgctgtagttggctcccatggaagacagagctttcttcttcttcaggtcgtcctctgccctcctcttggcatcctcctcctcncttctggccttttcctccgccagtctgttctggcgctcnctctccttctctgcacgaatcctctgctgctccgctctctctggnacggcgcttctcgaattctctcttt

SEQ ID NO: 1411 - DNA, 1000 bp, Artificial Sequence
  Description of Artificial sequences:primer
  misc_feature (1)..(1000): troponin t3, skeletal, fast(TNNT3) gene.
cccaccttcaccatgtctgacgaggaagttgaacaggtggaggagcagtacgaagaagaagaggaagcccaggaggaagaggaagttcaagaagacaccgcagaggaggacgcggaagaggagaaaccgagacccaaactcactgctcctaagatcccagaaggggagaaagtggacttcgatgacatccagaagaagcgtcagaacaaagacctaatggagctccaggccctcatcgacagccactttgaagcccggaagaaggaggaggaggagctggtcgctctcaaagagagaatcgagaagcgccgtgcagagagagcggagcagcagaggattcgtgcagagaaggagagggagcgccagaacagactggcggaggaaaaggccagaagggaggaggaggatgccaagaggagggcagaggacgacctgaagaagaagaaagcgctgtcctccatgggcgccaactacagcagctacctggccaaggctgaccagaagagaggcaagaagcagacagcccgagagatgaagaagaagattctggctgagagacgcaagccgctcaacatcgatcaccttggtgaagacaaactgagggacaaggccaaggagctctgggagaccctgcaccagctggagattgacaagttcgagtttggggagaagctgaaacgccagaaatatgacatcaccacgctcaggagccgcattgaccaggcccagaagcacagcaagaaggctgggaccccagccaagggcaaagtcggcgggcgctggaagtagagaggccagaaaggccctcgaggcagagaccctccgccctcttgcacaccagggccgctcgtgggactccacatcctccagcccccacaatcctgtcaggggtctccctgacgtcctgggggtggagaggccatcccggggcgtcccccgcgtctgtgtccttgctgccttcatcccctggggcctgtgaataaagctgcagaaccccctt

SEQ ID NO: 1412 - DNA, 266 bp, Artificial Sequence
  Description of Artificial sequences:primer
  misc_feature (1)..(266): 3' terminal sequence from clone image:611946. neural precursor cell expressed, developmentally down-regulated 5(NEDD5) gene.
  misc_feature (164)..(164): n is a, c, g, or t
tttttttttttttttttttttttttttttttttaatatctaaacaatagtgctttattgataaaaggttagtttaaatggatacaaaattgctgtgtaaaataagtgttttcaaaatacatttctataggtagagactatgtcttagtaaaagagcagttatcnattatcaaaagtatctatttagatttgggtagtaaaaccaaaggggatcagaagtgtagcagtgtgggtcctccctccctgcatagctgttaccaggaggca

SEQ ID NO: 1413 - DNA, 402 bp, Artificial Sequence
  Description of Artificial sequences:primer
  misc_feature (1)..(402): 5' terminal sequence from clone image:611946. neural precursor cell expressed, developmentally down-regulated 5(NEDD5) gene.
  misc_feature (225)..(225): n is a, c, g, or t
  misc_feature (260)..(260): n is a, c, g, or t
  misc_feature (280)..(280): n is a, c, g, or t
gcccataaggcttggtgccctgaacctctgatgcctaccgggttctcctgatttgagtttcctttaaatactccctttttgagtaattttctgatgggaggaaagtagcagtcatcatctttttggtgtgcaggctgtctcatttatttttagccattgtcgtttcattcattttgtgtaatataaaccagtgtgtcatgtcaaagtgaaagacatttcaaatcntgtagcataggctagtgggcaggtccgcacagtcngaaagcccacaccttggtcntgttttcctgtgcactgtagccttagtgtcacctttcttcttgtgtctccttatggtacactccagcggttgccttttttatcatttctactgaagttgggaaattcaacccccagaaattg

SEQ ID NO: 1414 - DNA, 3433 bp, Artificial Sequence
  Description of Artificial sequences:primer
  misc_feature (1)..(3433): neural precursor cell expressed, developmentally down-regulated 5(NEDD5) gene.
cccagctcggtgctgccgccatcttcttggaggacaggaggagaggcgaaggctccccctccccgtgatcgctccgcactcccgccaccacctgccctcccgcgaccgcctctctcctcctcagtgggcacttgtctccttctaacaaacggccttccccccactccagttacccaccgcaaggcgaagattctcattacctgttccactcttataagcataagaaaaccgagctcataagacgaagcttcacaaaagatgtctaagcaacagccaactcagtttataaatccagaaacacctggctatgttggatttgcaaacctccccaatcaagttcaccgaaaatcagtgaaaaaaggttttgagttcacactgatggtggtcggtgaatcaggtctaggaaaatcgactctcataaacagcctattcctaactgatctgtacccagaaagagtcatacctggagcagcagaaaaaattgaaagaactgtccagattgaggcttcaactgttgaaattgaagagcgaggggtcaagctacgcctgacagtggtagatacccctggctatggtgacgctatcaactgcagagattgttttaagacaattatctcctatattgatgagcaatttgagaggtacctgcatgacgagagcggcttgaacaggcggcacatcattgataatagggtgcattgttgcttttactttatttcaccttttggacatggacttaagcccttagatgtggcgtttatgaaggcaatacacaacaaggtgaatattgtgcctgtcattgcaaaagctgacactctcaccctgaaggaacgggagcggctgaagaaaaggattctggatgaaattgaagaacataacatcaaaatctatcacttacctgatgcagaatcagatgaagatgaagattttaaagagcagactagacttctcaaggctagcatcccattctctgtggttggatccaatcagttgattgaagccaaaggaaagaaggtcagaggccgcctctacccctggggtgttgtggaagtggagaacccagagcacaatgactttctgaagctgagaaccatgctcatcacccacatgcaggatctccaggaggtgacccaggaccttcattatgaaaacttccgttctgagagactcaagagaggcggcaggaaagtggagaatgaggacatgaataaagaccagatcttgctggaaaaagaagctgagctccgccgcatgcaagagatgattgcaaggatgcaggcgcagatgcagatgcagatgcagggcggggatggcgatggcggggctctcgggcaccacgtgtaaggtgatgtgcacatatcaagaagtcagagaaaacactttcctggataaaaaagaaaacattccagatgcatgatccagctgtgtgttttcaatccttgggagggtgccatccacattttaacagtacctgtgcctgagaatttaatttttaaaagactttgatgtgtttttgtatgaagtacttttaacgtatgtatttcattgctgtgtcacactctgtgttttgtgaggtgaatgtcttccttttctttctccctaaccactaatgttagaattgatttccaagaatcggcatgtatacttaatactgaatttctttgatttaactgacttaacaactgactaaccattgatgagcactcctgatttttatctagaacattcagatttaccataatgttccttagtggtagaggtgtgtgcctagtgatgtagaaagatacactgacttggtgcaaggccatctgcttaccacatcacaccacttggagatctttgcttccttgcttttatgtttgtacacaacacctaaaaccagttttgctgctataattctatactgttgattcgtctgcgattttatctgttaaccaaataaaacataatagaatttcctaatgagatatatctttatacttaaacagcttttttagaggtgagttttaaagaagtctcttaattctgatgctaggttgtttttaaaaccactatgcaaagaactcaccacaagccaccttttgtagtgttctccactaatactggttatcctgtgctacagagaaaatcaaagcagtcataagctccagttttccgtattgcaaataagactcttacctacaaaatgagattccagtgaactaatttggtttttactcaaccaaattaaaaatttttttaaggaaaattagcagttggtctattcagaatcaaacctttttatattttatactgcactttagtgtattttctgtcactgtaggtatagaagatctgcctcccctgtggaaattggggtctgttggtgggcttgcccctgaagcctggcttgggttgaaaagtgttcccgccctaaggccttggtgccctgaacctctgatgcctaccgggttctcctgatttgagtttcctttaaatactccctttttgagtaattttctgatgggaggaaagtagcagtcatcatctttttgtgtgcaggctgtctcatttatttttagccattgtcgtttcattcattttgtgtaatataaaccgtgtgtcatgtcaaagtgaaagacatttcaaatctgtagcataggctagtgggcaggtccgcacagtcgaagccacacctggtctgttttctgtgcactgtagccttagtgtcacctttcttcttgtgtctccttatggtacactccagcggttgccttttttatcatttctactgaagttgggaaattcaaccccagaaattgacagatgaaaggagacaatggttgtgtagggagatggagaaaatgcttaatctgaggatgagacagggttttttcatttttgtgggggctagaaaaaacataaaatgaggcagttaaataataatagttaatgaaggtgtgctacagaaaataatctggtgttcttgctaactttgcccttcactgttgcttaattgtgaacagccaaaagctatatgttatggcttattgtgtgaaggtaactaagaagtggtgttccatgacttcagagtacatccatgcggagtccattatttgagtttgacatttaataactttgctggaaaatctgtaaaaaagaaaaacaagtttgctagtgactaagccccgcatatgtgagtgaaagtacttcaggcacgctgcctcctggtaacagctatgcagggagggaggacccacactgctacacttctgatcccctttggttttactacccaaatctaaatagatacttttgataatagataactgctcttttactaagacatagtctctacctatagaaatgtattttgaaaacacttattttacacagcaattttgtatccatttaaactaaccttttatcaataaagcactattgtttagatatt

SEQ ID NO: 1415 - DNA, 530 bp, Artificial Sequence
  Description of Artificial sequences:primer
  misc_feature (1)..(530): 3' terminal sequence from clone image:612365. heat shock 70kda protein 9b (mortalin-2)(HSPA9B) gene.
  misc_feature (473)..(473): n is a, c, g, or t
ttttcaagatgctttctgtatttatttaaaaaaaaaaaaattccagaatgggtaagagaacaatcatcaaggatgtaggtgccagacagagggcagaaggtagctagaaaagtatgccttagggaagttaaaggtctagcctcattcctaccttgttttaatagctgtacctaatataaatagctaagtttcccattgttctagattcctctgccccatctacaaacatggcacagccagcttgacttgcaaggcctcagttgaaggaccccatgtacatacaggccagtacagcagtactaggctaactagaaggatctcatccccatatgtggtctcatttcaagtctatggatgactaccttcattgctgtgtgcgagatggtttcaccccttgaaaatatggtcacttcagcataaaatagttaaatctttataatgatcaattcatcctacctcccttttacatggcngctgaaaaatgacaggctagggacataggaatattgtgaacttttataccggttaga

SEQ ID NO: 1416 - DNA, 463 bp, Artificial Sequence
  Description of Artificial sequences:primer
  misc_feature (1)..(463): 5' terminal sequence from clone image:612365. heat shock 70kda protein 9b (mortalin-2)(HSPA9B) gene.
  misc_feature (409)..(409): n is a, c, g, or t
ggacgtgagcagcagattgtaaatccagtcttctggtggattaagcaaagatgatattgaaaatatggttaaaaatgcagagaaatatgctgaagaagaccggcgaaagaaggaacgagttgaagcagttaatatggctgaaggaatcattcacgacacagaaaccaagatggaagaattcaaggaccaattaccctgcctgatgagtgcaacaagctgaaagaagagatttccaaaatgagggagctcctggctagaaaagacagtgaaacaggagaaaatattagacaggcagcatcctctcttcagcaggcatcattgaagctgttcgaaatggcatacaaaaagatggcatctgagccgagaaggctctggaagttctggcactggggaacaaaaggaagatcanaggaggaaaaacagtaataatagcagaattttgaagccagaaggccacatatga

SEQ ID NO: 1417 - DNA, 353 bp, Artificial Sequence
  Description of Artificial sequences:primer
  misc_feature (1)..(353): 3' terminal sequence from clone image:62429.
ttcacagagccaagccttgtccatgacgcatcactaatcatgtgtaaaagtagggctttgtgcttgcttcggcggcacatatcctaaaattggaacaatacggggaaagttagcatggcttctgcataaggaggcagcacagatctttgaagcattccatattttgtgcagtcactggaaggtcatttgactatttgctgactagctctgaggaaatagtgtgaatcaaagcaaaatgggtgccacccaaatattgaaattgtgatttgtgctgcaaaaatagtcatgtaagatggtctgtgagatgacttagacctgaataacatgttcggtggcaaaatatattgttaggt

SEQ ID NO: 1418 - DNA, 270 bp, Artificial Sequence
  Description of Artificial sequences:primer
  misc_feature (1)..(270): 5' terminal sequence from clone image:62429.
  misc_feature (236)..(236): n is a, c, g, or t
agaagcaaaattaggacttaataacattttctgaaaactacaacatttgtatattagaacctatgaacaaaatatgcattgggttttatttgggattccaagataattttagtcataaagtttaggaacagattattccattgctttactatttctctgagcatttaaaaaatgttatctcgttaaacctttataacaacctagtgaaataaggcagcaaagtcctcactttgttngagaagacattgagcctaagagaagcaagttgtc

SEQ ID NO: 1419 - DNA, 283 bp, Artificial Sequence
  Description of Artificial sequences:primer
  misc_feature (1)..(283): 3' terminal sequence from clone image:624513. homo sapiens transcribed sequence with strong similarity to protein pir:s29331 (h.sapiens) s29331 glutamate dehydrogenase human.
  misc_feature (269)..(269): n is a, c, g, or t
cacatctgtggactggagagagaaaggctacgtgactcctttcaaaagcttttccaaaaacagaagaggaaggaacactcctcaactcattccatgaggctagaattgtctggatacaaagacaataaagcccttctttgctagctccatggtgaacctccttgtgatcttttccagtttgttatcggtatagttcttgggatagatcttaacaccagctttagcacccccaaacggcacatccggtggaacgcactgcgcagacggcncggcgcagcactcg

SEQ ID NO: 1420 - DNA, 464 bp, Artificial Sequence
  Description of Artificial sequences:primer
  misc_feature (1)..(464): 5' terminal sequence from clone image:624513. homo sapiens transcribed sequence with strong similarity to protein pir:s29331 (h.sapiens) s29331 glutamate dehydrogenase human.
  misc_feature (63)..(63): n is a, c, g, or t
  misc_feature (111)..(111): n is a, c, g, or t
  misc_feature (322)..(322): n is a, c, g, or t
  misc_feature (414)..(414): n is a, c, g, or t
  misc_feature (423)..(423): n is a, c, g, or t
  misc_feature (449)..(449): n is a, c, g, or t
  misc_feature (463)..(463): n is a, c, g, or t
gcaggggacagctggaagaaagactcgtcaacggccgagtgctggcgccggcgcgatcatgcncagtgcgttccaccggatgtgccgtttgggggtgctaaagctggtgtnaagatctatcccaagaactataccgataacaaacgtggaaaagatcacaaggaggttcaccatggagctagcaaagaagggctttattgtctttgtatccagacaattctagcctcatggaatgagttgaggagtgttccttcctcttctgtttttggaaaagcttttgaaaggagtcacgtagcctttctctctccagtccacagatgtngggatctcaagaaagccaggcgttccctgggaacttgtttcccctttccctgtgcttctggtatttgaaaaaccattcatcacctgcctganttcttcaantggtcttcaaagaaaagttaattaanatgtttaagaagcna

SEQ ID NO: 1421 - DNA, 456 bp, Artificial Sequence
  Description of Artificial sequences:primer
  misc_feature (1)..(456): 3' terminal sequence from clone image:625541. guanine nucleotide binding protein (g protein), beta polypeptide 2-like 1(GNB2L1) gene.
ttttgccagttttttttttatttgtaaagctctgccataaacttctagcgtgtgccaatggtcacctgccacactcgcaccaggttgtccgtgtagccagcaaacagagtctggccatcagcagaccaggccagggaggtgcactggggtggttctgccttgctgctggtactgataacttcttgcttcagttcatctacaatgatctttccctctaaatcccagatcttgatgctggggcctgtggaagcacacagccagtagcggttagggctgaagcacagggcgttgatgatgtccccaccatctagcgtgtaaaggtgtttgccttcgttgagatcccataacatggcctgggccatccttgcctccagaagcacagagggatccatctggagagacagtcaccgtgttcagatagcctgtgtggccaatgtggttggtcttcagcttgca

SEQ ID NO: 1422 - DNA, 530 bp, Artificial Sequence
  Description of Artificial sequences:primer
  misc_feature (1)..(530): 5' terminal sequence from clone image:625541. guanine nucleotide binding protein (g protein), beta polypeptide 2-like 1(GNB2L1) gene.
  misc_feature (471)..(471): n is a, c, g, or t
  misc_feature (528)..(528): n is a, c, g, or t
gaaactgaccagggatgagaccaactatggaattccacagcgtgctctgcggggtcactcccactttgttagtgatgtggttatctcctcagatggccagtttgccctctcaggctcctgggatggaaccctgcgcctctgggatctcacaacgggcaccaccacgaggcgatttgtgggccataccaaggatgtgctgagtgtggccttctcctctgacaaccggcagattgtctctggatctcgagataaaaccatcaagctatggaataccctgggtgtgtgcaaatacactgtccaggatgagagccactcagagtgggtgtcttgtgtccgcttctcgcccaacaagcagcaaccctatcatcgtctcctgtggctgggacaagctggtcaaggtatggaaccttggctaactgcaagctgaagaccaaccacattgggccaaacaggctatctgaacacggtgantgtctctccagatggattccctctgtgcttctggaagcaaggaatggccaggccatntt

SEQ ID NO: 1423 - DNA, 451 bp, Artificial Sequence
  Description of Artificial sequences:primer
  misc_feature (1)..(451): 3' terminal sequence from clone image:625574. guanine nucleotide binding protein (g protein), beta polypeptide 2-like 1(GNB2L1) gene.
  misc_feature (433)..(433): n is a, c, g, or t
cagaaaagccagttttttttttatttgtaaagctctgccataaacttctagcgtgtgccaatggtcacctgccacactcgcaccaggttgtccgtgtagccagcaaacagagtctggccatcagcagaccaggccagggaggtgcactggggtggttctgccttgctgctggtactgataacttcttgcttcagttcatctacaatgatctttccctctaaatcccagatcttgatgctggggcctgtggagcacacagccagtagcggttagggctgaagcacagggcgttgatgatgtccccaccatctagcgtgtaaaggtgtttgccttccgttgagatcccataacatggcctgggcatccttgcctccagaagcacagagggatccatctggagagacagtcaccgtgttcagatagcctgtgtggncaatgtggttggtcttca

SEQ ID NO: 1424 - DNA, 530 bp, Artificial Sequence
  Description of Artificial sequences:primer
  misc_feature (1)..(530): 5' terminal sequence from clone image:625574. guanine nucleotide binding protein (g protein), beta polypeptide 2-like 1(GNB2L1) gene.
  misc_feature (1)..(1): n is a, c, g, or t
  misc_feature (34)..(34): n is a, c, g, or t
  misc_feature (38)..(38): n is a, c, g, or t
  misc_feature (153)..(153): n is a, c, g, or t
  misc_feature (156)..(156): n is a, c, g, or t
ntaagccatccagtgccatcctcgtcgctgcagnaacnacagctctcgccgccgccatgactgagcagatgacccttcgtggcaccctcaagggccacaacggctgggtaacccagatcgctactaccccgcagttcccggacatgatcctcntcngccgtctcgagataagaccatcatcatgtggaaactgaccagggatgagaccaactatggaattccacagcgtgcatcgtgcggggtcactcccactttgttagtgatgtggttatctcctcagatggccagtttgccctctcaggctcctgggatggaaccctgcgcctctgggatctcacaacgggcaccaccacgaaggcgatttgtgggccataccaaggatgtgctgagtgtggccttctcctctgacaaccggcagattgtctctggatctcgagaataaaaccatcaagctatggaataccctgggtgtgtgcaaataaactgtcaggatgagagcactcaaagttggtgtcttgtgtccgcttctc

SEQ ID NO: 1425 - DNA, 264 bp, Artificial Sequence
  Description of Artificial sequences:primer
  misc_feature (1)..(264): 3' terminal sequence from clone image:628602. myosin, light polypeptide 3, alkali, ventricular, skeletal, slow(MYL3) gene.
  misc_feature (100)..(100): n is a, c, g, or t
  misc_feature (115)..(115): n is a, c, g, or t
  misc_feature (136)..(136): n is a, c, g, or t
  misc_feature (159)..(159): n is a, c, g, or t
  misc_feature (192)..(192): n is a, c, g, or t
  misc_feature (220)..(220): n is a, c, g, or t
  misc_feature (230)..(230): n is a, c, g, or t
ccggcaagaagccatttattcatgaggcccatggggtggggacagagctgctgtcacaggtaagcacagcctgagaggggccagagacggcaaccacgtngagaggtccaagggnttttgcaggagtcttggtaangctccccctccttcccacgactnccaggcccgctggtgtcagcatcacacatgggngatgaagacgttccctgcaaaagccttnccctgggggnttcctgggtaacgagggttatcctggtacatcag

SEQ ID NO: 1426 - DNA, 356 bp, Artificial Sequence
  Description of Artificial sequences:primer
  misc_feature (1)..(356): 5' terminal sequence from clone image:628602. myosin, light polypeptide 3, alkali, ventricular, skeletal, slow(MYL3) gene.
  misc_feature (2)..(2): n is a, c, g, or t
  misc_feature (198)..(198): n is a, c, g, or t
tntggccacgctgggtgagaggctgacagaagacgaatggagaagttgatggctgggcaagaggactccaatggctgcatcaactatgaagcatttgtgaagcacatcatgtccagctaaacctcgtgcccaggaagcccagggaaggctgtgcagggacgtctcatctcccatgtgtgatgctgacaccagcggccntggagtcgtgggaaggaggggagccttaccaagactcctgcaaaaacccttggacctctccacgtggttgccgtctctggccctctcaggctgtgcttacctgtgacagcagctctgtcccaccccatggcctcatgaataaatggcttcttgccggc

SEQ ID NO: 1427 - DNA, 872 bp, Artificial Sequence
  Description of Artificial sequences:primer
  misc_feature (1)..(872): myosin, light polypeptide 3, alkali ventricular, skeletal, slow(MYL3) gene.
ctgctttctgcattcttctctccacatgcctctctgtacttacagccccaatggcccccaaaaagccagagcccaagaaggatgatgccaaggcagcccccaaggcagctccagctcccgcacctccccctgagcctgagcgccctaaggaggtcgagtttgatgcttccaagatcaagattgagttcacacctgagcagattgaagagttcaaggaagccttcatgctgttcgaccgcacacccaagtgtgagatgaagatcacctacgggcagtgtggggatgtcctgcgggcgctgggccagaaccccacacaggcagaagtgctccgtgtcctggggaagccaagacaggaagagctcaataccaagatgatggactttgaaactttcctgcctatgctccagcacatttccaagaacaaggacacaggcacctatgaggacttcgtggaggggctgcgggtcttcgacaaggagggcaatggcactgtcatgggtgctgagcttcgccacgtgctggccacgctgggtgagaggctgacagaagacgaagtggagaagttgatggctgggcaagaggactccaatggctgcatcaactatgaagcatttgtgaagcacatcatgtccagctaaacctcgtgcccagaagccaggaaggctgtgcaggacgtctcatctcccatgtgtgatgctgacaccaagcggcctggagtcgtgggaaggaggggagccttaccaagactcctgcaaaaacccttggacctctccacgtggttgccgtctctggcccctctcaggctgtgcttacctgtgacagcagctctgtccccaccccatgggcctcatgaataaaggcttcttgccggc

SEQ ID NO: 1428 - DNA, 507 bp, Artificial Sequence
  Description of Artificial sequences:primer
  misc_feature (1)..(507): 3' terminal sequence from clone image:632026. cytochrome c oxidase subunit vib(COX6B) gene.
tttttttttttttttccaatgagtttttattagcaggtaagtcatgatttaggatcctggggtggggatcactgggtaccaggtcccccttcaccatcctgggagaaggatggaggacagaggaaagggagatgcagccagttcagatcttcccgggaaacgtgccttcagcccgttgctcatcccagtctgtgacccaggatgtggggcagagggactggtacacacgctggtaccattcgcacacagagatatcgcctcctttagcggtcattgccttctgacagcggtggaagtccaggtagttctgccagcagtttctagtctggttctggttggggaagcggctgtcaaaaggggcggtcttgtagttcttgattttggtctccatgtcttccgccatggtgctgaatccaaaggcaccccggattcaacctgcagctcaatgtgaccctcagcaaagacaccacagtcggacaggaagcggaactactaccagcctcgtgc

SEQ ID NO: 1429 - DNA, 492 bp, Artificial Sequence
  Description of Artificial sequences:primer
  misc_feature (1)..(492): 5' terminal sequence from clone image:632026. cytochrome c oxidase subunit vib(COX6B) gene.
ctggtagtagttccgcttcctgtccgactgtggtgtctttgctgagggtcacattgagctgcaggttgaatccggggtgcctttaggattcagcaccatggcggaagacatggagaccaaaatcaagaactacaagaccgccccttttgacagccgcttccccaaccagaaccagactagaaactgctggcagaactacctggacttccaccgctgtcagaaggcaatgaccgctaaaggaggcgatatctctgtgtgcgaatggtaccagcgtgtgtaccagtccctctgccccacatcctgggtcacagactgggatgagcaacgggctgaaggcacgtttcccgggaagatctgaactggctgcatctccctttcctctgtcctccatccttctcccaggatggtgaagggggactggtacccagtgattcccaccccaggatctaaatcatgacttacctgctaataaaaactcattggaaaaaaaaa

SEQ ID NO: 1430 - DNA, 578 bp, Artificial Sequence
  Description of Artificial sequences:primer
  misc_feature (1)..(578): cytochrome c oxidase subunit vib(COX6B) gene.
cctcctgggagggagctgaagccgctcgcaagactcccgtagtccccacctctctcagcttccggctggtagtagttccgcttcctgtccgactgtggtgtctttgctgagggtcacattgagctgcaggttgaatccggggtgcctttaggattcagcaccatggcggaagacatggagaccaaaatcaagaactacaagaccgccccttttgacagccgcttccccaaccagaaccagactagaaactgctggcagaactacctggacttccaccgctgtcagaaggcaatgaccgctaaaggaggcgatatctctgtgtgcgaatggtaccagcgtgtgtaccagtccctctgccccacatcctgggtcacagactgggatgagcaacgggctgaaggcacgtttcccgggaagatctgaactggctgcatctccctttcctctgtcctccatccttctcccaggatggtgaagggggacctggtacccagtgatccccaccccaggatcctaaatcatgacttacctgctaataaaaactcattggaaaagtgaaaaaaaaaaaaaaaaaaaaa

SEQ ID NO: 1431 - DNA, 497 bp, Artificial Sequence
  Description of Artificial sequences:primer
  misc_feature (1)..(497): 3' terminal sequence from clone image:664980. dnaj (hsp40) homolog, subfamily d, member 1(DNAJD1) gene.
  misc_feature (354)..(354): n is a, c, g, or t
  misc_feature (428)..(428): n is a, c, g, or t
  misc_feature (471)..(471): n is a, c, g, or t
tttttttttttgactattaacattttattgttatacagcttaatggtggaagataagactgtggtcaatccatatagaaaattaagaagaccatgttttagaatattttgcagggcttttttttttttcgaagtcccctctttttttttccttcagtgtggtccttaagcatcaatgtttggtggttgtttctagcaagtcttttgcttcatttattttggctgctacgtaaggagatccacctttatctgggtgattcaaaatcatgactctcctatgagctgttctaatcttagccttgccagcagatgggcttacacctaaaataagaccagcttctcgcctactcatttncggttcaaatcctccctttatagtaggatgaaaagctaggagttgaaatcttcctttggcagtttccggtgganaacttgttccaagagggtttccagaatccgaaaagcggagganccctggcaaaatggcaaagaggctgc

SEQ ID NO: 1432 - DNA, 1074 bp, Artificial Sequence
  Description of Artificial sequences:primer
  misc_feature (1)..(1074): dnaj (hsp40) homolog, subfamily d, member 1(DNAJD1) gene.
ggtcaggaaagctcaggcaagcccaccctcaggcattacagctagactccgagcttactgggcagtcatctgattcgaccaacatcagttcgcagggcttaagcccagtcccttacggcggctggggagggaccaggcccaagtatataaagctccctgagggtccgcgttggctttgcgcctgtgagtgtgattcaagaacgtcccagtgcccttggctcctttcggagtgtgaccccgtgcttgcacgggacacgttacccagctcgggtgagaagggtatcttccgggaacctcgcctttaatagcacaacgagcgcagagtccactggatctgcgagaagaaaccgcgctaactagtttgtccctacggccgcctcgtagtcactgccgcggcgccttgagtctccgggccgccttgccatggctgcccgtggtgtcatcgctccagttggcgagagtttgcgctacgctgagtacttgcagccctcggccaaacggccagacgccgacgtcgaccagcagggactggtaagaagtttgatagctgtaggactgggtgttgcagctcttgcatttgcaggtcgctacgcatttcggatctggaaacctctagaacaagttatcacagaaactgcaaagaagatttcaactcctagcttttcatcctactataaaggaggatttgaacagaaaatgagtaggcgagaagctggtcttattttaggtgtaagcccatctgctggcaaggctaagattagaacagctcataggagagtcatgattttgaatcacccagataaaggtggatctccttacgtagcagccaaaataaatgaagcaaaagacttgctagaaacaaccaccaaacattgatgcttaaggaccacactgaaggaaaaaaaaagaggggacttcgaaaaaaaaaaaagccctgcaaaatattctaaaacatggtcttcttaattttctatatggattgaccacagtcttatcttccaccattaagctgtataacaataaaatgttaatagtcttgctttttattatcttttaaagatctccttaaattct

SEQ ID NO: 1433 - DNA, 267 bp, Artificial Sequence
  Description of Artificial sequences:primer
  misc_feature (1)..(267): 3' terminal sequence from clone image:665117. aldo-keto reductase family 1, member a1 (aldehyde reductase)(AKR1A1) gene.
  misc_feature (179)..(180): n is a, c, g, or t
  misc_feature (193)..(193): n is a, c, g, or t
  misc_feature (196)..(197): n is a, c, g, or t
  misc_feature (200)..(200): n is a, c, g, or t
  misc_feature (204)..(204): n is a, c, g, or t
  misc_feature (210)..(212): n is a, c, g, or t
  misc_feature (220)..(220): n is a, c, g, or t
  misc_feature (232)..(232): n is a, c, g, or t
  misc_feature (238)..(238): n is a, c, g, or t
  misc_feature (244)..(245): n is a, c, g, or t
  misc_feature (248)..(248): n is a, c, g, or t
  misc_feature (251)..(251): n is a, c, g, or t
  misc_feature (255)..(255): n is a, c, g, or t
  misc_feature (258)..(258): n is a, c, g, or t
  misc_feature (261)..(261): n is a, c, g, or t
  misc_feature (263)..(263): n is a, c, g, or t
tttttttttggatgctccaatggctttattaactccctctttccgttgtggcaggacctcattagctgcagactggaagggaggccaagaagctgtggtctcagtacgggtcattaaaggggtacagaggatgccctgcatccattgggactctcttcccatccaccgtaagcataggnncaaaaaaatcccnaannttntttnagggcnnnttatctgnttggtttctctnttgggntaaagnngangtnaaanacnttnantgtt

SEQ ID NO: 1434 - DNA, 476 bp, Artificial Sequence
  Description of Artificial sequences:primer
  misc_feature (1)..(476): 5' terminal sequence from clone image:665117. aldo-keto reductase family 1, member a1 (aldehyde reductase)(AKR1A1) gene.
  misc_feature (284)..(284): n is a, c, g, or t
  misc_feature (442)..(442): n is a, c, g, or t
  misc_feature (460)..(460): n is a, c, g, or t
  misc_feature (469)..(469): n is a, c, g, or t
accctattcacgctctgtgcttgtgccaaggtttcaagtgatcctcccgcctcagcctgcccaggtgctgagattacatgtatgagccactgcacctggaaaggagccagaaatgtgaagtgctagctgaaggatgagcagcagctagccaggcaaagggggcaatggcggcttcctgtgttctactgcacactgggcagaagatgcctctgattggtctgggtacctggaagagtgagcctggtcaggtaaaagcagctgttaagtatgcccttagccgtagnctaccgcacattgattgtgctgctatctacggcaatgagcctgagattgggggaggcctgaaaggaaggaccgtggggaccaggcaaggccgggtgcctccggggaaggaagcctggttttgtgacatccaaagcttgtggaaacaccaaagcaccanccccgaggaatgttgaancctgccctnccggaag

SEQ ID NO: 1435 - DNA, 1556 bp, Artificial Sequence
  Description of Artificial sequences:primer
  misc_feature (1)..(1556): aldo-keto reductase family 1, member a1 (aldehyde reductase)(AKR1A1) gene.
agcgccacctgcctcattgtgcccaggagttctccaaacccgcgctgcggagtgagtgaccaagttccggccagttcgacctcgaggatccagaggtggagacggtactacctcccagctctgttttccatccccttcaggtccttcctcgggaggcggcgaaggcggtccaccctgcgcgtgatcctttatgcccggcccctgcccctccctccgggtggaacttccccctcaccgccagacttaagctgaggatcgttggatctctggcggggtgcagaactgagcccaggccacagtaccctattcacgctctgtgcttgtgccaaggtttcaagtgatcctcccgcctcagcctgcccaggtgctgagattacatgtatgagccactgcacctggaaaggagccagaaatgtgaagtgctagctgaaggatgagcagcagctagccaggcaaagggggcaatggcggcttcctgtgttctactgcacactgggcagaagatgcctctgattggtctgggtacctggaagagtgagcctggtcaggtaaaagcagctgttaagtatgcccttagcgtaggctaccgccacattgattgtgctgctatctacggcaatgagcctgagattggggaggccctgaaggaggacgtgggaccaggcaaggcggtgcctcgggaggagctgtttgtgacatccaagctgtggaacaccaagcaccaccccgaggatgtggagcctgccctccggaagactctggctgacctccagctggagtatctggacctgtacctgatgcactggccttatgcctttgagcggggagacaaccccttccccaagaatgctgatgggactatatgctacgactccacccactacaaggagacttggaaggctctggaggcactggtggctaaggggctggtgcaggcgctgggcctgtccaacttcaacagtcggcagattgatgacatactcagtgtggcctccgtgcgtccagctgtcttgcaggtggaatgccacccatacttggctcaaaatgagctaattgcccactgccaagcacgtggcctggaggtaactgcttatagccctttgggctcctctgatcgtgcatggcgtgatcctgatgagcctgtcctgctggaggaaccagtagtcctggcattggctgaaaagtatggccgatctccagctcagatcttgctcaggtggcaggtccagcggaaagtgatctgcatccccaaaagtatcactccttctcgaatccttcagaacatcaaggtgtttgacttcacctttagcccagaagagatgaagcagctaaatgccctgaacaaaaattggagatatattgtgcctatgcttacggtggatgggaagagagtcccaagggatgcagggcatcctctgtacccctttaatgacccgtactgagaccacagcttcttggcctcccttccagctctgcagctaatgaggtcctgccacaacggaaagagggagttaataaagccattggagcatccaaaaaaaaaaaaaaaaaaaaaa

SEQ ID NO: 1436 - DNA, 570 bp, Artificial Sequence
  Description of Artificial sequences:primer
  misc_feature (1)..(570): 3' terminal sequence from clone image:665682. mitogen-activated protein kinase kinase 7(MAP2K7) gene.
  misc_feature (503)..(503): n is a, c, g, or t
  misc_feature (515)..(515): n is a, c, g, or t
  misc_feature (533)..(533): n is a, c, g, or t
  misc_feature (548)..(548): n is a, c, g, or t
  misc_feature (556)..(556): n is a, c, g, or t
gcttgatctggccccgctcgtccagcaggatgttggagggcttgacgtcgcggtggatgacaccgtgcttctccttcaggtagtacagcgccttcacaatcgccactgtcatcttgcccagaatgcgctcggggatggggccctgcatccgcttcttgagcttctcagcgcaggtgcccatgagctccatggcgatgaagacgtccgtgttggtgatgaacgtcccaaagcactgcacgatgtaggggcagtcgtggctcttcagcaccacatccaggtccatgaggatgcgcttgttctcctccttgttcccggagcgccgcatttgcttaacggcaatgacgtggccggtcttccggaagcgcatcttccacacctggccgcagtgccgctgcccatctcgcccaagttctccaggtcgttgatttctgcctggtagcgctggcccccgatggtcaggtaagccgtctgctttcatgatctcctgcagcttctggtcaatntcaatgctctcnatgctgcggggtgtgaanagggtttaacgggangccccagnatgtgggcggggcc

SEQ ID NO: 1437 - DNA, 353 bp, Artificial Sequence
  Description of Artificial sequences:primer
  misc_feature (1)..(353): 5' terminal sequence from clone image:665682. mitogen-activated protein kinase kinase 7(MAP2K7) gene.
  misc_feature (41)..(41): n is a, c, g, or t
  misc_feature (43)..(43): n is a, c, g, or t
  misc_feature (100)..(100): n is a, c, g, or t
  misc_feature (106)..(106): n is a, c, g, or t
  misc_feature (165)..(165): n is a, c, g, or t
  misc_feature (321)..(321): n is a, c, g, or t
tgtttgtctgccggactgacgggcggccgggcggtgcgcgncngcggttggcggcggggaagatggcggcgtcctccctggaacagaagctgtcccgccntggaancaaagctgaagcaggagaaccgggagcccggcggaggatcgacctcaacctggatatcngcccccagcggcccaggccaccctgcagctccgctggccaacgatgggggcagccgctcgccatcctcagagagctcccgcagcaccccacgcccccgcccggcccgcacatgctgggggtccgtcaaccctgttcacaccccgcagcatggagancattgagattgaccagaagctgcaggagatca

SEQ ID NO: 1438 - DNA, 1588 bp, Artificial Sequence
  Description of Artificial sequences:primer
  misc_feature (1)..(1588): mitogen-activated protein kinase kinase 7(MAP2K7) gene.
gcggtgtttgtctgccggactgacgggcggccgggcggtgcgcggcggcggtggcggcggggaaaatggcggcgtcctccctggaacagaagctgtcccgcctggaagcaaagctgaagcaggagaaccgggaggcccggcggaggatcgacctcaacctggatatcagcccccagcggcccaggcccaccctgcagctcccgctggccaacgatgggggcagccgctcgccatcctcagagagctccccgcagcaccccacgccccccgcccggccccgccacatgctggggctcccgtcaaccctgttcacaccccgcagcatggagagcattgagattgaccagaagctgcaggagatcatgaagcagacgggctacctgaccatcgggggccaggtaccaccttcactgtggcggggagagggaggaggcccagccaggctggacccatcctgggagcgccagtggggggcagggggcggtggcagagccccagggaccctccaaccctccctctcctcccagcgctaccaggcagaaatcaacgacctggagaacttgggcgagatgggcagcggcacctgcggccaggtgtggaagatgcgcttccggaagaccggccacgtcattgccgttaagcaaatgcggcgctccgggaacaaggaggagaacaagcgcatcctcatggacctggatgtggtgctgaagagccacgactgcccctacatcgtgcagtgctttgggacgttcatcaccaacacggacgtcttcatcgccatggagctcatgggcacctgcgctgagaagctcaagaagcggatgcagggccccatccccgagcgcattctgggcaagatgacagtggcgattgtgaaggcgctgtactacctgaaggagaagcacggtgtcatccaccgcgacgtcaagccctccaacatcctgctggacgagcggggccagatcaagttctgcgacttcggcatcagcggccgcctggtggactccaaagccaagacgcggagcgccggctgtgccgcctacatggcacccgagcgcattgaccccccagaccccaccaagccggactatgacatccgggccgacgtatggagcctgggcatctcgttggtggagctggcaacaggacagtttccctacaagaactgcaagacggactttgaggtcctcaccaaagtcctacaggaagagcccccgcttctgcccggacacatgggcttctcgggggacttccagtccttcgtcaaagactgccttactaaagatcacaggaagagaccaaagtataataagctacttgaacacagcttcatcaagcgctacgagacgctggaggtggacgtggcgtcctggttcaaggatgtcatggcgaagactgagtcaccgcggactagcggcgtcctgagccagccccacctgcccttcttcaggtagctgcttggcggcggccagccccacagggggccaggggcatggccacaggcccccctccccacttggccacccagctgcctgccaggggagacctgggacctggacggccacctaggactgaggacagagagtgg

SEQ ID NO: 1439 - DNA, 353 bp, Artificial Sequence
  Description of Artificial sequences:primer
  misc_feature (1)..(353): 3' terminal sequence from clone image:665778. solute carrier family 7 (cationic amino acid transporter, y+ system), member 6(SLC7A6) gene.
  misc_feature (41)..(41): n is a, c, g, or t
  misc_feature (201)..(201): n is a, c, g, or t
  misc_feature (278)..(278): n is a, c, g, or t
  misc_feature (339)..(339): n is a, c, g, or t
tttttttttttttttttttttttaaggctttttctttttanttcattttaatgtaattagctacacgtggctagtagctgttgcagcggacaccacaggtctaaggaaacaacacagaacattcagctaggggtgtaccctcatagcctgtgagtgtctcttactcactgtcatgggggaaggtgagttacacagggaggnaccttcttgccgcctcttttaggatttcctaagtatctctccttcatcctacctgccatcattctttgactttatgnccattttctaaacctttgcctacacttgctcttatctacatggagttgttcaacctgccgnagtgattaaattct

SEQ ID NO: 1440 - DNA, 569 bp, Artificial Sequence
  Description of Artificial sequences:primer
  misc_feature (1)..(569): 5' terminal sequence from clone image:665778. solute carrier family 7 (cationic amino acid transporter, y+ system), member 6(SLC7A6) gene.
  misc_feature (473)..(473): n is a, c, g, or t
  misc_feature (495)..(495): n is a, c, g, or t
  misc_feature (528)..(528): n is a, c, g, or t
  misc_feature (553)..(553): n is a, c, g, or t
cccgtacagcactcaagcttcatggtggaattaatttctgccagctctttgttgtctgtctccttaaatccttttcctggtgtgcttattatcccttttgcagtgagtacagtttattaagttgtcagccctttaatattggggaaacttaatgagtataaatagcagggagcacattgtaacagcacagtgttttgtttttttcacccggttgctgtatgagaatggctttcaatcctttgtttctatgcctacagacagaaagcaagatgtctaatattagacatacaagttgctgcctgttataacggtgaattatacctttgtgcatgcctaggatgtttgttgttttaattagctgcaatatatacggcctgtgtacacagaatttaatcacttcggcaggttgaacaactccatgtagataaggagcaagtggaggccaaaggtttagaaaatgggacataaagtcnaaagaaatgatgggcagggtangatgaaaggagagataccttaggaaaatcctanaaagaaggcggcaagaagggtaccnccctggggtaacttca

SEQ ID NO: 1441 - DNA, 6296 bp, Artificial Sequence
  Description of Artificial sequences:primer
  misc_feature (1)..(6296): solute carrier family 7 (cationic amino acid transporter, y+ system), member 6(SLC7A6) gene.
cactgggagagtttatgtggccgaggcagacaagtggaattaggccttgctgcaggggacttcatttccttctcagtactggacccatttatgaggaggtggcttatgaaagtgtgatgttcgcgtatttcttgacaggcagtggcgtgatcttggctcactgcaacctccgactccctggttcaagcgattctcctgcctcagcctcctgagtggggattacaggccacagcaaacacaggtgtgcaggaaccgtttgtcatggaagccagggagcctgggaggcccacacccacctaccatcttgtccctaacaccagccagtcccaggtggaagaagatgtcagctcgccacctcaaaggtcctccgaaactatgcagctgaagaaggagatctccctgctgaatggggtcagcctggtggtgggcaacatgatcggctcagggatctttgtctcacccaagggtgtgctggtacacactgcctcctatgggatgtcactgattgtgtgggccattggtgggctcttctctgttgtgggtgccctttgttatgcagagctggggaccaccatcaccaagtcgggagccagctacgcttatattctagaggcctttgggggcttcattgccttcatccgcctgtgggtctcactgctagttgttgagcccaccggtcaggccatcatcgccatcacctttgccaactacatcatccagccgtccttccccagctgtgatcccccatacctggcctgccgtctcctggctgctgcttgcatatgtctgctgacatttgtgaactgtgcctatgtcaagtggggcacacgtgtgcaggacacgttcacttacgccaaggtcgtagcgctcattgccatcattgtcatgggccttgttaaactgtgccagggacactctgagcactttcaggacgcctttgagggttcctcctgggacatgggaaacctctctcttgccctctactctgccctcttctcttactcaggttgggacacccttaattttgtaacagaagaaatcaaaaacccagaaagaaatttgcccttggccattgggatttctatgccaattgtgacgctcatctacatcctgaccaatgtggcctattacacagtgctgaacatttcagatgtccttagcagtgatgctgtggctgtgacatttgctgaccagacgtttggcatgttcagctggaccatccccattgctgttgccctgtcctgctttgggggcctcaatgcatccatctttgcttcatcaaggttgttcttcgtgggctcccgggagggccacctaccggaccttctgtccatgatccacattgagcgttttacacctatccctgctttactgttcaattgcaccatggcactcatctacctcatcgtggaggatgttttccagcttatcaactacttcagcttcagctactggttcttcgtgggcctgtctgttgttggacagctctacctccgctggaaggagcccaagcggccccggcctctcaagctgagcgtgtttttccccatcgtgttctgcatatgctccgtgtttctggtgatagtgcccctcttcactgacaccattaattccctcattggcatcgggattgccctttctggagtccctttctacttcatgggtgtttacctgccagagtcccggaggccattgtttattcggaatgtcctggctgctatcaccagaggcacccagcagctttgcttttgtgtcctgactgagcttgatgtagccgaagaaaaaaaggatgagaggaaaactgactagaggtcagaggtggctttctgaggcctggaaggcaggccaaccagcaaaatcctgataacaagactctgtgggcccaactctcctgaattaaaggagccttttgacccaatcatatagtggggctcagggccagtgctcactcttattggtaagctataggagactcaggatctgggccaacctcaaggtgggggcttcagagggtggggggaagattggggaacggggggaatggtcatttagttttactcctgataggtagatgcagctcttacagatatttacttggtaaagtgcagtggggaagagggaatgctaggttgatagggctggtggcttctgaatttggtatttgaactaggagtccctatagaggggctgctttatgggaagtttttctctgaccaggtacaacacctgactttaaaggcctgaaatgctaccatttcttcctctggctcaaaattcttccctggggagagagttatattcccttatttattgatatttagtccagaacaccagttctaacgaagcatgcgtgtctcttcatctacaggatgcaataggctgattgtatttaaaaatcaaagtacccaaaactgagtccctttgggctcagaaatgtctgtggtattgggtcagactctgaccacagattttatgctgtttagcacaatttctattgagtcttacctgcaacaatgaaccttaaagatttttttactcacgtacctgttacactttagcatacagatagatcatagatcacgttacaagcacttggctcaggtccagcaaggacagatgaacaaattcctgagtcagaagtctgttaatattgctgttttgaaggacaatcctttattttacttgagaccttacatctttgttctagctgacagtaaatctctgggtttctgttacgaactctaagagggctgaaacttctgatattcaggtggatcacctgaattctctcagctgtcaatggcttggagaacatctcatgggcccaagtcatcaaataacctgttcctctctgtaagggcagtgtgagggactgctgtgcagacccaagcaatcccaacctggtgctaggtcatttcacttttctgaaaacctcacatcaggctgcatcctcttctgtccctggcaccaggctttgtttacacttggagccaccttggtgtgggtcaccgggacagtgtactcctctcctgccagcctccccttccccgaggtgtggtggctgcagtctcaggaagagcttggtacttgtggggacttctgttttctccctgtggagatcagtgaagactgggaggaaagctgcttcaacctgagtccggctcttcagcaggctgcacaagtggaagcaactaattctggtgctcaggctgggctctccacccaagttaggcctgctctggcctaatggatcttactgtatgagcaggacggctgcattggattgtacaactgttttgtgatgcccccagacactgtcatcctaggccgagaagaacctgctagcttgacataccccatgggcttatccttaggttttggaattggtcaacagtgaggcagtctcccttcctgaccattcttctccacccagtcacagataagggaataaccttggccatatatttgctcaataaagattgaaggaagcatggtcatagttgccctgggttcagagcataatgcatatgtgaagcatggggtgacattcctactgtcatgggtttgggatttgtaacggcaaattcctgcccgacgacagggtgtcttatgcaaaggctgacttgcctgaacgctaagaacatgacttctgtctgagctaagctggcacccatcccagggctcctctggagctaatcctttaagcaaaatgtgcttgccttttaaagatccctgaccccagctttagctttctccaccagataaccagctaatcccaggaatttgctgccccccaccagtggcttctagggaaagcaaggacctcacatgccaggtgccctagtacttgcttagtgagccatgtcatcctcctttcatttttggatggtgacagcatttttcccctctgtgctggatacagacttctcccaggatcctctctttgggagcgaagccagaggatccctacagcactcaagcttcatggtggaattaatttctgccagctctttgttgtctgtctccttaaatccttttcctggtgtgcttattatcccttttgcagtgagtacagtttattaagttgtcagccctttaatattggggaaacttaatgagtataaatagcagggagcacattgtaacagcacagtgttttgtttttttcacccggttgctgtatgagaatggctttcaatcctttgtttctatgcctacagacagaaagcaagatgtctaatattagacatacaagttgctgcctgttataacggtgaattatacctttgtgcatgcctaggatgtttgttgttttaattagctgcaatatatacggcctgtgtacacagaatttaatcacttcggcaggttgaacaactccatgtagataagagcaagtgtaggcaaaggtttagaaaatggacataaagtcaaagaatgatggcaggtaggatgaaggagagatacttaggaaatcctaaaagaggcggcaagaaggtacctccctgtgtaactcaccttcccccatgacagtaagagacactcacaggctatgagggtacacccctagctgaatgttctgtgttgtttccttagacctgtggtgtccgctgcaacagctactagccacgtgtagctaattacattaaaatgaaataaaattaaaagctcagtttctcagttgcgctaatcacatttcaagtgctcagcagccacccgtgtctactactacacagtgcagacacagaacatatcatcactgcagatagttctactggacaatgttacgctagaataaacaccaaggcagtcagttaaggcagctatggtttggaaaggcatacggacagagtctgcttagaagagatacaagttgttaataaaattgatcctgttgatagtagtttgtttttgtggtgggtgctgtgaagagtaaacattactcagtggaaagctaagttcagaaggtactttgtttttcctcccttgccttaagtccttggtatttataatcaatgctgaaccttctatttcactaccgctccctgttttagatattcagatttaaaaggttttcaaagaattactttcttccatgttcaaagctagattttactaaacacatgtatcacattcatatatattgtttcttggccccactgccaaaggaagtcagtcagtaatttcacaaccgttatcagagtttggaagcagaaatagctgttaactaaaatctcccactgctcagactactttctgccctaatggccattactatccagtctgtattgctacaagggacccactggtaccccttttagattctatcaaaaggaacagggttttcctagaggcaggcagcctggtggtatggcacagcagaagcttactgctaatgaaatgggaacctccccctcccttgtggtttcagcacagaacctgaatgccaggaaaaattcctgggccaagaagctaaagctaaagaaaccttccttttttcaacgtttttttttctttcaaactgtagggtcacttttgattgaggcaaaggggtcctactgtaagtggaaaagactcactcccctaacataagttttcactgtggtgggatggtgccgcccgatatgcttgatatgcttttccttccacatgttaagctaggaaacctaacaggatgtcagcagggcagttaactctggactcagagccctcaagggcatgtggcagaacctcatggacatcacaagaccatcagtctgaatccaggtcgtgggggctgtcatagccgaactccttctgcacatccagagggtacttgctccacatccgctgtctgctgctgcctctttcctcctcactcaggctgttgtagtcagcagagcctagaatgacatcccgggagtggattctaaatgtgattttcctaggctactgcaggagccccttctcttctcagaaaggtctgtttttgttcccgattgtaatgcaaaatccttgctcaataaataaaaaagaatatagaattcttttttttttaaagaaggaatcactttcctatcatctaaaccaagttccttcacactggagtattttgtcacttctcccctccgtggagtattttgtcacttctcccctccgtataggattttttgttgttgtaagagttgtagtcatattgtaaatatttttgtacctttctccttttaacgtgttattgacaaacctccccaaaagaatatgcaattgtttgattcatttctctgttatcagacaccaataaattctttttgttgggc

SEQ ID NO: 1442 - DNA, 513 bp, Artificial Sequence
  Description of Artificial sequences:primer
  misc_feature (1)..(513): 3' terminal sequence from clone image:665818. annexin a6(ANXA6) gene.
  misc_feature (249)..(249): n is a, c, g, or t
  misc_feature (283)..(283): n is a, c, g, or t
  misc_feature (324)..(324): n is a, c, g, or t
  misc_feature (327)..(328): n is a, c, g, or t
  misc_feature (333)..(333): n is a, c, g, or t
  misc_feature (352)..(353): n is a, c, g, or t
  misc_feature (381)..(381): n is a, c, g, or t
  misc_feature (387)..(387): n is a, c, g, or t
  misc_feature (423)..(423): n is a, c, g, or t
  misc_feature (429)..(429): n is a, c, g, or t
  misc_feature (433)..(433): n is a, c, g, or t
  misc_feature (441)..(441): n is a, c, g, or t
  misc_feature (444)..(444): n is a, c, g, or t
  misc_feature (450)..(450): n is a, c, g, or t
  misc_feature (458)..(458): n is a, c, g, or t
  misc_feature (462)..(463): n is a, c, g, or t
  misc_feature (476)..(476): n is a, c, g, or t
  misc_feature (481)..(482): n is a, c, g, or t
  misc_feature (493)..(493): n is a, c, g, or t
  misc_feature (498)..(498): n is a, c, g, or t
  misc_feature (501)..(501): n is a, c, g, or t
  misc_feature (504)..(505): n is a, c, g, or t
ttttttttttaaactaagttttataaataatgtctgataactctgtgtatataaaaactaaactccaacagccacaaagaggtgtccgtaagtttacaagaaagggattttttttctttttttttcttttttttttaactagcaaagtttctattatactttcttcccttttccattcatatggtcaaatggtcttcttgtactcgccagaggtgtcattcttgatcatgctgtagagggacttctcanacttggtccggaagatctcccgaatgtcgagcangtccaactcactacgggagaccatgatgcggatcagggtgntgnncccgngtccccagggccttcaaanncctgaagaggcctttcaggaaaatattncggggngctcccgataaacttcacctaaggggcagcattagnttctcnaagnccccaganagntccccncggaaagntggnntcaaacggggttncccgnngggcctcaganactcnatnggnnaccaaccg

SEQ ID NO: 1443 - DNA, 219 bp, Artificial Sequence
  Description of Artificial sequences:primer
  misc_feature (1)..(219): 5' terminal sequence from clone image:665818. annexin a6(ANXA6) gene.
  misc_feature (1)..(1): n is a, c, g, or t
ngagaccatggccaaaccagcacagggtgcatagtaccggggctccatccatgacttcccaggctttgaccccaaccaggatgccgaggctctgtacactgccatgaagggctttggcagtgacaaggaggccatactggacataatcacctcacggagcaacaggcagaggcaggaggtctgcagagctacaagtccctctacggcaaggacctcatt

SEQ ID NO: 1444 - DNA, 2528 bp, Artificial Sequence
  Description of Artificial sequences:primer
  misc_feature (1)..(2528): annexin a6(ANXA6) gene.
gccacgtgtccggctcggagcccacggctgtcctcccggtccgcgccgctgcggttgctgctgggctaacgggctccgatccagcgagcgctgcgtcctcgagtccgcccgtgcgggcgcagggacccgaggcctccgctgcggctggattctgctgcgaaccggagaccatggccaaaccagcacagggtgccaagtaccggggctccatccatgacttcccaggctttgaccccaaccaggatgccgaggctctgtacactgccatgaagggctttggcagtgacaaggaggccatactggacataatcacctcacggagcaacaggcagaggcaggaggtctgccagagctacaagtccctctacggcaaggacctcattgctgatttaaagtatgaattgacgggcaagtttgaacggttgattgtgggcctgatgaggccacctgcctattgtgatgccaaagaaattaaagatgccatctcgggcattggcactgatgagaagtgcctcattgagatcttggcttcccggaccaatgagcagatgcaccagctggtggcagcatacaaagatgcctacgagcgggacctggaggctgacatcatcggcgacacctctggccacttccagaagatgcttgtggtcctgctccagggaaccagggaggaggatgacgtagtgagcgaggacctggtacaacaggatgtccaggacctatacgaggcaggggaactgaaatggggaacagatgaagcccagttcatttacatcttgggaaatcgcagcaagcagcatcttcggttggtgttcgatgagtatctgaagaccacagggaagccgatgaaggccagcatccgaggggagctgtctggggactttgagaagctaatgctggccgtagtgaagtgtatccggagcaccccggaatattttgctgaaaggctcttcaaggctatgaagggcctggggactcgggacaacaccctgatccgcatcatggtctcccgtagtgagttggacatgctcgacattcgggagatcttccggaccaagtatgagaagtccctctacagcatgatcaagaatgacacctctggcgagtacaagaagactctgctgaagctgtctgggggagatgatgatgctgctggccagttcttcccggaggcagcgcaggtggcctatcagatgtgggaacttagtgcagtggcccgagtagagctgaagggaactgtgcgcccagccaatgacttcaaccctgacgcagatgccaaagcgctgcggaaagccatgaagggactcgggactgacgaagacacaatcatcgatatcatcacgcaccgcagcaatgtccagcggcagcagatccggcagaccttcaagtctcactttggccgggacttaatgactgacctgaagtctgagatctctggagacctggcaaggctgattctggggctcatgatgccaccggcccattacgatgccaagcagttgaagaaggccatggagggagccggcacagatgaaaaggctcttattgaaatcctggccactcggaccaatgctgaaatccgggccatcaatgaggcctataaggaggactatcacaagtccctggaggatgctctgagctcagacacatctggccacttcaggaggatcctcatttctctggccacggggcatcgtgaggagggaggagaaaacctggaccaggcacgggaagatgcccaggtggctgctgagatcttggaaatagcagacacacctagtggagacaaaacttccttggagacacgtttcatgacgatcctgtgtacccggacgtatccgcacctccggagagtcttccaggagttcatcaagatgaccaactatgacgtggagcacaccatcaagaaggagatgtctggggatgtcagggatgcatttgtggccattgttcaaagtgtcaagaacaagcctctcttctttgccgacaaactttacaaatccatgaagggtgctggcacagatgagaagactctgaccaggatcatggtatcccgcagtgagattgacctgctcaacatccggagggaattcattgagaaatatgacaagtctctccaccaagccattgagggtgacacctccggagacttcctgaaggccttgctggctctctgtggtggtgaggactagggccacagctttggcgggcacttctgccaagaaatggttatcagcaccagccgccatggccaagcctgattgttccagctccagagactaaggaaggggcaggggtggggggaggggttgggttgggctcttatcttcatggagcttaggaaacgctcccactcccacgggccatcgagggccagcacggctgagcggtgaaaaaccgtagccatagatcctgtccacctccactcccctctgaccctcaggctttcccagcttcctccccttgctacagcctctgccctggtttggctatgtcagatccaataaacatcctgaacctctgtctgt

SEQ ID NO: 1445 - DNA, 305 bp, Artificial Sequence
  Description of Artificial sequences:primer
  misc_feature (1)..(305): 3' terminal sequence from clone image:667303. histone 1, h4c(HIST1H4C) gene.
gaagttctcaggagaccgcgtattcttagattcagccgccgaagccatacagagtgcgcccctgacgttttagggcatatactacatccatggctgtgacagttttgcgcttgggtgctccgtataggtgacggcgtctcgaataacgttctctaagaaaaccttaagcacacctcgagtctcctcatagataagaccggaaatgcgcttgacccaccgcgccgagccaaacggcgaatagcgggttttgtaatgccctggatgttatcccggagcaccttacgatggcgcttagcaccaccctt

SEQ ID NO: 1446 - DNA, 345 bp, Artificial Sequence
  Description of Artificial sequences:primer
  misc_feature (1)..(345): 5' terminal sequence from clone image:667303. histone 1, h4c(HIST1H4C) gene.
atcatgtctggtcgcggcaaaggcggaaaaggcttggggaagggtggtgctaagcgccatcgtaaggtgctccgggataacatccagggcattacaaaaccggctattcgccgtttggtcggcgcggtggcgtcaagccatttccggtcttatctatgaggagactcgaggtgtgcttaaggttttcttagagaacgttattcgagacgccgtcacctatacggagcacgccaagcgcaaaactgtcacagccatggatgtagtatatgccctaaaacgtcaggggcgcactctgtatggcttcggcggctgaatctaagaatacgcggtctcctgagaacttca

SEQ ID NO: 1447 - DNA, 390 bp, Artificial Sequence
  Description of Artificial sequences:primer
  misc_feature (1)..(390): histone 1, h4c(HIST1H4C) gene.
atgtctggtcgcggcaaaggcggaaaaggcttggggaagggtggtgctaagcgccatcgtaaggtgctccgggataacatccagggcattacaaaaccggctattcgccgtttggctcggcgcggtggcgtcaagcgcatttccggtcttatctatgaggagactcgaggtgtgcttaaggttttcttagagaacgttattcgagacgccgtcacctatacggagcacgccaagcgcaaaactgtcacagccatggatgtagtatatgccctaaaacgtcaggggcgcactctgtatggcttcggcggctgaatctaagaatacgcggtctcctgagaacttcaaaaaacaaaaacaaaaaaacccaaaggcccttttcagggccgctca

SEQ ID NO: 1448 - DNA, 433 bp, Artificial Sequence
  Description of Artificial sequences:primer
  misc_feature (1)..(433): 3' terminal sequence from clone image:66800.
  misc_feature (52)..(52): n is a, c, g, or t
  misc_feature (56)..(56): n is a, c, g, or t
  misc_feature (70)..(70): n is a, c, g, or t
  misc_feature (108)..(108): n is a, c, g, or t
  misc_feature (117)..(117): n is a, c, g, or t
  misc_feature (140)..(140): n is a, c, g, or t
  misc_feature (197)..(197): n is a, c, g, or t
  misc_feature (200)..(200): n is a, c, g, or t
  misc_feature (209)..(209): n is a, c, g, or t
  misc_feature (232)..(232): n is a, c, g, or t
  misc_feature (247)..(247): n is a, c, g, or t
  misc_feature (265)..(266): n is a, c, g, or t
  misc_feature (300)..(300): n is a, c, g, or t
  misc_feature (305)..(305): n is a, c, g, or t
  misc_feature (338)..(338): n is a, c, g, or t
  misc_feature (348)..(348): n is a, c, g, or t
  misc_feature (363)..(363): n is a, c, g, or t
  misc_feature (372)..(372): n is a, c, g, or t
  misc_feature (424)..(424): n is a, c, g, or t
aaacattttaatcatttctgccctgttactcccaccccagatccaagcgccnccangttccggtgggggntcagtctccggagtccaggagtcagggctcgggggcgntcagggcangtgggaagattggggctttcctntcctcgaagctgcacaaaggtggccccagccagaacacagggagagggagagagatntgntcatcagtntgggcaggcgggcgggagcagtnttccagaaacaggtnggagccagggtcattttnntagccaagggtcccaggagttccccaggattcgngccantgggtggtccatggtgggtgaggggccagattntggcatttgntacaggcagtaaaantcctgattntcagtgatggtcccaaaaagcacacccagaagattgggttcaaagttcaagntggggcccc

SEQ ID NO: 1449 - DNA, 428 bp, Artificial Sequence
  Description of Artificial sequences:primer
  misc_feature (1)..(428): 3' terminal sequence from clone image:66820. cleavage and polyadenylation specific factor 5, 25 kda(CPSF5) gene.
  misc_feature (3)..(3): n is a, c, g, or t
  misc_feature (9)..(9): n is a, c, g, or t
  misc_feature (11)..(11): n is a, c, g, or t
  misc_feature (47)..(47): n is a, c, g, or t
  misc_feature (189)..(189): n is a, c, g, or t
  misc_feature (246)..(246): n is a, c, g, or t
  misc_feature (278)..(279): n is a, c, g, or t
  misc_feature (338)..(338): n is a, c, g, or t
ttncctcantnttctaccacatttattctacactgtatatagctgtntcacagagacaagcggcttcttttacttctccactgcgcaggaattcagttgtaaataaaattgaacctgctcaacagctgagggagactagaaatgatgggtccatatcctggggcattgtcatacaattcaaacaatggngcagctaccagcttgtaatttttagggactgcaaacaaggctttttcttgaagctgnaccagaaacaacttcttatgttccttaggctnngtaatatgtgcaggaatatatgggatactgagggagggtcaaaatttgggtctccaccnggttaccaatggcaatcgtcaatgacccagtcttgccaaaactccatcctggacggacccaggtatctctggtcattaggcgttttaggt

SEQ ID NO: 1450 - DNA, 764 bp, Artificial Sequence
  Description of Artificial sequences:primer
  misc_feature (1)..(764): cleavage and polyadenylation specific factor 5, 25 kda(CPSF5) gene.
atgtctgtggtaccgcccaatcgctcgcagaccggctggccccggggggtcactcagttcggcaacaagtacatccagcagacgaagcccctcaccctggagcgcaccatcaacctgtaccctcttaccaattatacttttggtacaaaagagcccctctacgagaaggacagctctgttgcagccagatttcagcgcatgagggaagaatttgataaaattggaatgaggaggactgtagaaggggttctgattgtacatgagcaccggctaccccatgtgttactgctgcagctgggaacaactttcttcaaactacctggtggtgaacttaacccaggagaagatgaagttgaaggactaaaacgcttaatgacagagatactgggtcgtcaggatggagttttgcaagactgggtcattgacgattgcattggtaactggtggagaccaaattttgaacctcctcagtatccatatattcctgcacatattacaaagcctaaggaacataagaagttgtttctggttcagcttcaagaaaaagccttgtttgcagtccctaaaaattacaagctggtagctgcaccattgtttgaattgtatgacaatgcaccaggatatggacccatcatttctagtctccctcagctgttgagcaggttcaattttatttacaactgaattcctgcgcagtggagaagtaaaagaagccgcttgtctctgtgagcacagctatatacagtgtagaataaatgtggtag

SEQ ID NO: 1451 - DNA, 383 bp, Artificial Sequence
  Description of Artificial sequences:primer
  misc_feature (1)..(383): 3' terminal sequence from clone image:66832.
  misc_feature (61)..(61): n is a, c, g, or t
  misc_feature (136)..(136): n is a, c, g, or t
  misc_feature (151)..(151): n is a, c, g, or t
  misc_feature (162)..(162): n is a, c, g, or t
  misc_feature (170)..(170): n is a, c, g, or t
  misc_feature (173)..(173): n is a, c, g, or t
  misc_feature (201)..(201): n is a, c, g, or t
  misc_feature (214)..(214): n is a, c, g, or t
  misc_feature (217)..(217): n is a, c, g, or t
  misc_feature (238)..(238): n is a, c, g, or t
  misc_feature (251)..(251): n is a, c, g, or t
  misc_feature (262)..(262): n is a, c, g, or t
  misc_feature (295)..(295): n is a, c, g, or t
  misc_feature (309)..(310): n is a, c, g, or t
  misc_feature (335)..(335): n is a, c, g, or t
  misc_feature (375)..(375): n is a, c, g, or t
ttatatgaggatttcccaggggatttttattacttgcgataagtaaggaggacactgggantaattccccaaagcaatgcctccctgagcaatggtgcaaacatggcttttattagtctggttagctgagtcattntatgtagaggtggantcaaggcagcnagtcccanttntcggttatgctgctacatatgtcacatntatagaaaatggngantaagctcctccttggacaggnttttaagtatggngatgaggaaanttggccaaagttcatctccaactcaggcatctntgggtccaactggnntttgtttttcctggggctaagcttnttcctggaacgttactgtcgttgtaatactccacgatgtntttcaggg

SEQ ID NO: 1452 - DNA, 484 bp, Artificial Sequence
  Description of Artificial sequences:primer
  misc_feature (1)..(484): 3' terminal sequence from clone image:66836.
  misc_feature (15)..(16): n is a, c, g, or t
  misc_feature (448)..(448): n is a, c, g, or t
  misc_feature (462)..(462): n is a, c, g, or t
gctaagctggtagannattcactgtagttagattttgcttaatataagtttgtgtctgttgttaattatgtaaatcctttcctatggaaaacagctaattaccattttaatctaatagattcttgttatgcagatatttgtgcacatttggaatagatatgtttcagaaaagctgattataaagccaaattttatattatgaggcttaattttcccattgattttcattttaaaatataatttgggttccattggagtgccggggtgtgggtgtgttcactggggccatgggtccctgttgccctgctgggattggatgtaggaaattttgaggtttaggaggaaccaggaggttttaaaggtcccataactttggcatcttcagggtaatggtatactggaatttttctggctcaggtttaaatggtatagggggggaaaattcagnccggtccattttgnttttaagggggccaaataaccc

SEQ ID NO: 1453 - DNA, 432 bp, Artificial Sequence
  Description of Artificial sequences:primer
  misc_feature (1)..(432): 3' terminal sequence from clone image:668494. general transcription factor iie, polypeptide 1, alpha 56kda(GTF2E1) gene.
cagtataaaacagatttattgtcaacattcagtcattaacacaacccaggtaaatgaaacatcactccatacaaggctcatatattctttacatgtgtactataaaatgataaatacttaaaaattacaatgcaaggaaaaatattgtaagatatacaattgttacagacccttgtgtgaaagttctttatttttaaagttctgccttagggaaaataccatgctacatatcagaacccaaaataaactgtttcctgaggttacaatgctcaatggtatactggatgcaccctaaaatactgtgtctgacaaaaattaaaagagagacagccttcaatgatgtttagaaagagggagagtgacagagagagagaagagtaatcaattattctgttgatttctgctggaatggcctcattaaacaatttatag

SEQ ID NO: 1454 - DNA, 326 bp, Artificial Sequence
  Description of Artificial sequences:primer
  misc_feature (1)..(326): 5' terminal sequence from clone image:668494. general transcription factor iie, polypeptide 1, alpha 56kda(GTF2E1) gene.
aaaaaacctgaaattttgcttagaatttgagcatttcctcaaaattgagatggatcaatatgtaaggggaggtgggagcgtgtgtggaagggggagagatatacttgagtcttatgattaatgtctaaaccagaatttgtgtctttagaactgaccagactggtagattttattgtattgcttaatgtcttttggtttggatttaggatgatagaaaacagaagtataattggtaaacccttaggaagaaattagaaaaacatggacgtaagacaagaagtctctgtgaagggttgaagagtgacaagcattggtaacagtgcctt

SEQ ID NO: 1455 - DNA, 2969 bp, Artificial Sequence
  Description of Artificial sequences:primer
  misc_feature (1)..(2969): general transcription factor iie, polypeptide 1, alpha 56kda(GTF2E1) gene.
ctaaattacccactacgttgcttgtatatttaaagttggagttcgttgctaaagatggcagacccagatgtcctcactgaagttccagcagcattgaagcggttagccaagtatgtgatccggggattttatggcattgagcatgccttggccttggacatcttgatcaggaactcctgtgtgaaagaggaggatatgctggagctgctcaagtttgatcggaagcaacttcgatcagttttgaataatttaaagggagacaagtttatcaaatgcagaatgagggtagagactgctgcagacgggaaaaccactcgccataactactacttcatcaattatcgtactcttgttaatgtggtaaaatataaactggaccacatgagaagaagaattgagaccgatgagagagattcgaccaaccgggcttccttcaaatgtcctgtctgtagtagtactttcacagacttagaagctaatcagctctttgatcctatgacaggaactttccgctgtactttttgccatacagaggtagaagaggatgaatcagcaatgcccaaaaaagatgcacgcacacttttggcaaggtttaatgaacaaattgagcccatttatgcattgcttcgggagacagaggatgtgaacttggcctatgaaatacttgagccagaacccacagaaatcccagccctgaaacagagcaaggaccatgcagcaactactgctggagctgctagcctagcaggtgggcaccaccgggaagcatgggccaccaaaggtccttcctatgaagacttatacactcagaatgttgtcattaacatggatgaccaagaagatcttcatcgagcctcactggaagggaaatctgccaaagagaggcctatttggttgagagaaagcactgtccaaggggcatatggttctgaagatatgaaagaagggggcatagatatggacgcatttcaggagcgtgaggaaggccatgctgggcctgatgacaacgaagaggtcatgcgagcactgctcattcacgagaaaaagacttcctctgccatggctggttcagtgggggcagctgctccagtgaccgctgccaatggcgatgactcagaaagcgagaccagtgagtcagatgatgattctccaccccgtccggcagctgtggctgtgcataaacgagaagaggatgaagaggaagatgacgagtttgaagaagtagcagatgaccccattgtcatggtggctggccgtccgttctcctacagtgaagtgagccaacggccagagctagtggcccagatgacaccagaagaaaaggaagcatatatagcaatgggacaacgcatgtttgaggacctctttgagtgagctttccctaattctttctcctttctctaatgctcagttcaaaaaggaatgtctcatctttgaagaaaagtatttaagtggctttctgcccctcttgatgtaagcaactgtccatccttgtgcaaagattgatggtagagagcttgacttttatgccagaaactttcccagcaaggtagggtgctgagaatcctacccttccttgctgtcactacagtattaatattttactgtattttcttttcttttttttttttttttggagatgaagtctcactcttgtaccccaggctggagtgcaatggcgtgatctcggctcactgcaacctctgcctcctgggttcaagcgattctcctgcctcagcctcccgagtagctgggattacaggtgcctgccaccatgcctggctaatttttgtatttttagtagaggcagggtttcaccatgttagccaggatgatctcgatctcctgacctcatgatccacccgcctcggcctcccaaagtgctgtattttcttatctgatttttttcttgccttattaagacataattttctcccttctgaaatgagtgagggaagttcataaggtaaatccttcccatccatctgtttactacaataggttacaataattcactgatcacatccattttatctgttctagccaggcattccaaacaatttcttatactgctgcccaccaaagcagcttgccaacagtcaaatcactgattgggggaaaaaatcctgaaattttgcttagaatttgagcatttcctcaaaattgagatggatcaatatgtaaggggaggtgggagcgtgtgtggaagggggagagatatacttgagtcttatgattaatgtctaaaccagaatttgtgtctttagaactgaccagactggtagattttattgtattgcttaatgtcttttggtttggatttaggatgatagaaaacagaagtataattggtaaacccttaggaagaaattagaaaaacatggacgtaagacaaaaagtctctgtgaagggttgaagagtgacaagcattggtaacagtgccttagaactgtgtcagttagtctgatttggaaatcctttatgtaaagctgagactggtcctggttttgttccctttggtacagacctcttgtcagtgctataaattgtttaatgaggccattccagcagaaatcaacagaataattgattactcttctctctctctgtcactctccctctttctaaacatcattgaaggctgtctctctttaattttgtcagacacagtattttagggtgcatccagtataccattgagcattgtaacctcaggaaacagtttattttgggttctgatatgtagcatggtattttccctaaggcagaactttaaaaataaagaactttcacacaagggtctgtaacaattgtatatcttacaatatttttccttgcattgtaatttttaagtatttatcattttatagtacacatgtaaagaatatatgagccttgtatggagtgatgtttcatttacctgggttgtgttaatgactgaatgttgacaataaatctgttttatactg

SEQ ID NO: 1456 - DNA, 565 bp, Artificial Sequence
  Description of Artificial sequences:primer
  misc_feature (1)..(565): 3' terminal sequence from clone image:66895. homo sapiens transcribed sequences.
  misc_feature (477)..(477): n is a, c, g, or t
  misc_feature (527)..(527): n is a, c, g, or t
  misc_feature (555)..(555): n is a, c, g, or t
gcttaataaattggggtcctaggtttttattttttttccacctgggggataatattactaatgataattattatggttattggtatagtaataaaacacttattgagcatttattatatgccaggaactgtgcttaacattttacacactttgaatcatttaatccttctactaaccttatcacagataaggcctcttattatccccatttcccccatttccctgataaggaaggcacagagaggttaggcattttgttcaaggtcccacagcgctatgataagtcacagaagccagggacctgaatccagcttttgtttctccagaatctgtgctattaatcaggtatataacctgctctacatcacaagtgttcctatctgttttacatactggggcctctgttggtagggtctcatttaaacaaggggtctgggaaaggtatataatacaggcttttttttttaggatgatccnattaacattgaggaaattgggtgcaggcccatttgggaggggcccatggngtctttggaaatgctggggggccatggntgacccggcc

SEQ ID NO: 1457 - DNA, 420 bp, Artificial Sequence
  Description of Artificial sequences:primer
  misc_feature (1)..(420): 3' terminal sequence from clone image:67721. ribosomal protein s14(RPS14) gene.
  misc_feature (16)..(16): n is a, c, g, or t
  misc_feature (122)..(122): n is a, c, g, or t
  misc_feature (186)..(186): n is a, c, g, or t
  misc_feature (200)..(200): n is a, c, g, or t
  misc_feature (230)..(230): n is a, c, g, or t
  misc_feature (349)..(349): n is a, c, g, or t
tttttttttttttcangaaggcaatttattaacagaaaatattttgaggaatcttgttcacagacggcgaccacggcgaccccccttcctgcgagtgctgtcagaggggatgggggtgacancctcaatccgcccgatcttcatacccgagcgggcaagggctctgagggccgactgggcccaggnccaggggtcttggncctatttcctcctgtggcccggagtttgangtgtagggcggtgatacccagctccttgcacctctgggccacatcctgggcagccaacatagcagcatatggtgaggattcatctcggtctgcctttaccttcatcccaccagtcacanggcagatgagtttctttgccagaaagatcagtgacatgggacaaaagtgtcatttgaaggatgcaaagata

SEQ ID NO: 1458 - DNA, 322 bp, Artificial Sequence
  Description of Artificial sequences:primer
  misc_feature (1)..(322): 5' terminal sequence from clone image:67721. ribosomal protein s14(RPS14) gene.
  misc_feature (29)..(29): n is a, c, g, or t
  misc_feature (79)..(79): n is a, c, g, or t
  misc_feature (102)..(102): n is a, c, g, or t
  misc_feature (105)..(105): n is a, c, g, or t
  misc_feature (120)..(120): n is a, c, g, or t
  misc_feature (167)..(167): n is a, c, g, or t
  misc_feature (246)..(246): n is a, c, g, or t
  misc_feature (278)..(278): n is a, c, g, or t
gagacgacagtacagaaatggcacctcgnaaggggaaggaaaagaaggaagaacaggtcatcagcctcggacctcaggnggctgaaggagagaatgtatttngtntctgccatatctttncatccttcaatgacacttttgtccatgtcactgatctttctggcaangagaccatctgccgtgtgactggtgggatgaaggtaaaggcagaccgagatgaatcctcaccatatgctagctatgttngctgcccaggatgtggcccagaggtgcaaggngctgggtatcaccgccctaacacatcagactccgggccacagga

SEQ ID NO: 1459 - DNA, 589 bp, Artificial Sequence
  Description of Artificial sequences:primer
  misc_feature (1)..(589): ribosomal protein s14(RPS14) gene.
ctccgccctctcccactctctctttccggtgtggagtctggagacgacgtgcagaaatggcacctcgaaaggggaaggaaaagaaggaagaacaggtcatcagcctcggacctcaggtggctgaaggagagaatgtatttggtgtctgccatatctttgcatccttcaatgacacttttgtccatgtcactgatctttctggcaaggaaaccatctgccgtgtgactggtgggatgaaggtaaaggcagaccgagatgaatcctcaccatatgctgctatgttggctgcccaggatgtggcccagaggtgcaaggagctgggtatcaccgccctacacatcaaactccgggccacaggaggaaataggaccaagacccctggacctggggcccagtcggccctcagagcccttgcccgctcgggtatgaagatcgggcggattgaggatgtcacccccatcccctctgacagcactcgcaggaaggggggtcgccgtggtcgccgtctgtgaacaagattcctcaaaatattttctgttaataaattgccttcatgtaaaaaaaaaaaaaaaaaaaaaaaaaaaaaaaa

SEQ ID NO: 1460 - DNA, 407 bp, Artificial Sequence
  Description of Artificial sequences:primer
  misc_feature (1)..(407): 3' terminal sequence from clone image:67740. keratin 23 (histone deacetylase inducible)(KRT23) gene.
  misc_feature (170)..(170): n is a, c, g, or t
  misc_feature (213)..(213): n is a, c, g, or t
  misc_feature (348)..(348): n is a, c, g, or t
  misc_feature (358)..(358): n is a, c, g, or t
  misc_feature (371)..(371): n is a, c, g, or t
tgctagtgcggagttttattggctacaaaatagatgcaaaatgatgagaatctgaaggctgcagtaggaaagtagagctttaccctcataaactcgcactttgattagaaaagtgcaatatattaagagcattatgagaagtctggtgagactgttacagaaaaaaaaantaaaagtttctgagtctgataattccaagggtatcttttaganctcactcactggtgtctgtgcaaggactttccttgggggaaaatagattttacaacaggcggaaactttcattggtctcatgcgtgcttttggatttcattcacttgacaaagaactaatcttccgttgaatggnctcctggggnttatggccttganctttgggagttgcagacactttcatgctcgactttg

SEQ ID NO: 1461 - DNA, 342 bp, Artificial Sequence
  Description of Artificial sequences:primer
  misc_feature (1)..(342): 5' terminal sequence from clone image:67740. keratin 23 (histone deacetylase inducible)(KRT23) gene.
  misc_feature (2)..(2): n is a, c, g, or t
  misc_feature (9)..(9): n is a, c, g, or t
  misc_feature (19)..(19): n is a, c, g, or t
  misc_feature (22)..(22): n is a, c, g, or t
  misc_feature (68)..(68): n is a, c, g, or t
  misc_feature (76)..(76): n is a, c, g, or t
  misc_feature (137)..(137): n is a, c, g, or t
  misc_feature (143)..(143): n is a, c, g, or t
  misc_feature (242)..(242): n is a, c, g, or t
  misc_feature (291)..(291): n is a, c, g, or t
cngtgcggngggagcccantcntccctgtccttcaccacgcggactgcccaccccctggagggtcttngggttctngaagaagcagccccctactaggcggaaatgggaaggccaccatgcagaatctcaacgaccncctggnctcctacctggagaaggttcgcgccctggaggaggccaacatgaagctggaaagccgcatcctgaaatggcaccagcagagagatcctgggcagtaagnaaagattattcccagtatgaggacaacatcacacacctgcaggagcagntaagtgggattggtaagattgaccaatgttcagattattcttcttcttttg

SEQ ID NO: 1462 - DNA, 2163 bp, Artificial Sequence
  Description of Artificial sequences:primer
  misc_feature (1)..(2163): keratin 23 (histone deacetylase inducible)(KRT23) gene.
ggcagatgaaatataagattcatcaaccacatttgacagcccatggcaggtttcctgttttccatcgtccctctgcaggtcacagacacacagagcccagccgtggcaggctcagccggggtccggggctgctaacaacggctacattcctcccccagggccaagggaaatcctgagcgcaggccagggttgtttggttttgaggtgtgctgggatgaaaggcaccctggaagtggaaggtaaatgaacaatggaaaaacttcacggcaagattagaaagatacctgagcccaatacccgcctgatgtcgtgggccacacctccgggttaccaggggaagggaggaagcaaactgtcatattgatgtggctctaaacaacaacagtgtgcgaaggcccaggggcactttgggattgaccaagaggaaacacaagttgcacaatgatacaatcttgttggtacaattgtcagagaagggaactcccacagcaaaggccataaaaccatccagggcagtctggggcggctcagttctgcggtgccagggagtggagcagagctcagccccgtcccaaacacagatgggaccatgaactccggacacagcttcagccagaccccctcggcctccttccatggcgccggaggtggctggggccggcccaggagcttccccagggctcccaccgtccatggcggtgcggggggagcccgcatctccctgtccttcaccacgcggagctgcccaccccctggagggtcttggggttctggaagaagcagccccctactaggcggaaatgggaaggccaccatgcagaatctcaacgaccgcctggcctcctacctggagaaggttcgcgccctggaggaggccaacatgaagctggaaagccgcatcctgaaatggcaccagcagagagatcctggcagtaagaaagattattcccagtatgaggaaaacatcacacacctgcaggagcagatagtggatggtaagatgaccaatgctcagattattcttctcattgacaatgccaggatggcagtggatgacttcaacctcaagtatgaaaatgaacactcctttaagaaagacttggaaattgaagtcgagggcctccgaaggaccttagacaacctgaccattgtcacaacagacctagaacaggaggtggaaggaatgaggaaagagctcattctcatgaagaagcaccatgagcaggaaatggagaagcatcatgtgccaagtgacttcaatgtcaatgtgaaggtggatacaggtcccagggaagatctgattaaggtcctggaggatatgagacaagaatatgagcttataataaagaagaagcatcgagacttggacacttggtataaagaacagtctgcagccatgtcccaggaggcagccagtccagccactgtgcagagcagacaaggtgacatccacgaactgaagcgcacattccaggccctggagattgacctgcagacacagtacagcacgaaatctgctttggaaaacatgttatccgagacccagtctcggtactcctgcaagctccaggacatgcaagagatcatctcccactatgaggaggaactgacgcagctacgccatgaactggagcggcagaacaatgaataccaagtgctgctgggcatcaaaacccacctggagaaggaaatcaccacgtaccgacggctcctggagggagagagtgaagggacacgggaagaatcaaagtcgagcatgaaagtgtctgcaactccaaagatcaaggccataacccaggagaccatcaacggaagattagttctttgtcaagtgaatgaaatccaaaagcacgcatgagaccaatgaaagtttccgcctgttgtaaaatctattttcccccaaggaaagtccttgcacagacaccagtgagtgagttctaaaagatacccttggaattatcagactcagaaacttttattttttttttctgtaacagtctcaccagacttctcataatgctcttaatatattgcacttttctaatcaaagtgcgagtttatgagggtaaagctctactttcctactgcagccttcagattctcatcattttgcatctattttgtagccaataaaactccgcactagcaaaaaaaaaaaaaaaa

SEQ ID NO: 1463 - DNA, 296 bp, Artificial Sequence
  Description of Artificial sequences:primer
  misc_feature (1)..(296): 3' terminal sequence from clone image:67776.
  misc_feature (241)..(241): n is a, c, g, or t
  misc_feature (290)..(290): n is a, c, g, or t
cttaaattattggtgcagaaagaagaaggtgtatgtgaagaaagaaaatggacatttactgactattctgcaacacagcctgtgcagtgtgttaggatacacacccaacatctcctttaactcatctgttgccgcagactagtcaatgggagcaccaaaaactaggtaaaggctggtagttaaactaagtctgtttggctccaaagcttatgttggcaccacaacttcttcctaagacganggttggccttcactggtctgactcaaaagtaggagaaccatttactctnccagag

SEQ ID NO: 1464 - DNA, 367 bp, Artificial Sequence
  Description of Artificial sequences:primer
  misc_feature (1)..(367): 3' terminal sequence from clone image:68140.
  misc_feature (16)..(16): n is a, c, g, or t
  misc_feature (102)..(102): n is a, c, g, or t
  misc_feature (147)..(147): n is a, c, g, or t
  misc_feature (214)..(214): n is a, c, g, or t
cgccgcgtctgcgttngtcatggcggatcatcgaggtatcgccgatgtcctcgcccaccccattgaggtagaagcccagtacgccgaacagcgcattgcgcntgtccactgtgtgcaggtaacgttgccagtaagccacgctcacangctcgaatgcgtggcctgcctggcgaaaggcgtcgacgtaggtttcccagctcaggggctgcgggtnatgcaggttgaacaccgtccctccagcacggcagcggctgctctgggaacgcaattaaaccgggcgagaaagtccaccggcatcaggttcgaaaatttcaacttcaagggtgcggcaccagggccagttgggagtgaacctttgagcatcaaa

SEQ ID NO: 1465 - DNA, 70 bp, Artificial Sequence
  Description of Artificial sequences:primer
  misc_feature (1)..(70): 5' terminal sequence from clone image:68140.
cactgttggccgagggtgcacttgaagtggcgtgctggtgcgcgaacggcccggacattcggcgaccgcg

SEQ ID NO: 1466 - DNA, 324 bp, Artificial Sequence
  Description of Artificial sequences:primer
  misc_feature (1)..(324): 3' terminal sequence from clone image:68141.
cgtatgccttcctcactcctctccgaccaggctgggaacccgggtcagaggtaaatggtaagagttcaggcgagttcttgtcctgagagaagcccacacaaggagattttttccccctttctcacttcaatctctctcacagcggccagtgttcacatgcacctccgctccaaccccaacacacacactatggtttaagttctctccctgttcccctgtcctgagtggaagaaaggtttttatcttcctctagggcgctattcacctgcaacctcaaaaccccatcctctcttccccatctttcataggtctctacccggaaca

SEQ ID NO: 1467 - DNA, 348 bp, Artificial Sequence
  Description of Artificial sequences:primer
  misc_feature (1)..(348): 3' terminal sequence from clone image:68176. hypothetical protein flj10916(FLJ10916) gene.
  misc_feature (72)..(72): n is a, c, g, or t
  misc_feature (139)..(139): n is a, c, g, or t
  misc_feature (143)..(143): n is a, c, g, or t
  misc_feature (152)..(152): n is a, c, g, or t
  misc_feature (186)..(186): n is a, c, g, or t
  misc_feature (213)..(213): n is a, c, g, or t
  misc_feature (225)..(225): n is a, c, g, or t
  misc_feature (228)..(228): n is a, c, g, or t
  misc_feature (266)..(266): n is a, c, g, or t
  misc_feature (269)..(269): n is a, c, g, or t
  misc_feature (280)..(280): n is a, c, g, or t
  misc_feature (323)..(323): n is a, c, g, or t
ttttttcactgaacaagcattttattccagggattcccaacatgtgagcagggtggaagcctctgacaaggngggccagaacctttggatttggtttgggggccaaaatcaactaaggctcagagaacatacaaagccngcgngaaggtggngagctgctcccaccttcacaggtctgggggtccnaaacccctggggccatggtcagtcctntgcccaagcctnttnttttgcaggccctgaaactttcactacagctcagacantgntgcacgggccngggagggagggggtgcttccggcaacttttcacagcccctcantcagcctccctgggtgaccagggca

SEQ ID NO: 1468 - DNA, 341 bp, Artificial Sequence
  Description of Artificial sequences:primer
  misc_feature (1)..(341): 5' terminal sequence from clone image:68176. hypothetical protein flj10916(FLJ10916) gene.
  misc_feature (35)..(35): n is a, c, g, or t
  misc_feature (277)..(277): n is a, c, g, or t
gaggctgctcagctggatctggagccactggcttntgctccgttccctggctagtctgtgcctggtcaccagggaggctgagtgaggggctgtgaacagttgccggaagcaccccctccctccccggcccgtgcagcagtgtctgagctgtagtgaaagtttcagggcctgcaaaagaagaggcttgggcacaggactgaccatggctccaggggtttaggacccccagacctgtgaaggtggggagcagctcaccaccttcacgcaggcttttgtnatgtttctcttgagcctttagtttgatttttgggccccccaaacccaaattcccaaaggtttct

SEQ ID NO: 1469 - DNA, 1595 bp, Artificial Sequence
  Description of Artificial sequences:primer
  misc_feature (1)..(1595): hypothetical protein flj10916(FLJ10916) gene.
ggttggctctgagctccttccaaaagatgaattaaatgatctgatcgaccgagccttcagcagattccgtcacagagaagtggtccatctgtccaggttgaggaatgggctgaacgtgttggagctgtggcatggcgtcacatatgcatttaaggacctgtccctgtcctgcacaacacagttcctgcagtacttcctggagaagagggagaagcacgtcactgtggttgtaggaacatctggggacacaggaagtgctgccattgagagtgttcaaggggcaaagaacatggacattatcgttctgctgcccaaaggtcactgcacaaagattcaggagctccagatgacaacggtgctgaagcagaacgtacatgtgtttggagtggagggaaacagcgatgagctcgatgagccgatcaagactgtgtttgccgatgtggcttttgtcaagataggcctgcccatccgtctggtcgtggcagtgaaccgcaatgacatcatccacaggactgtccagcagggagacttctctctctctgaggctgttaaatcaaccttggcatcagctatggacattcaggtgccctacaacatggagagggtgttctggctgctctctggctctgacagccaggtgacaagagccctcatggagcagtttgaaaggacccaaagtgtgaatctgcccaaggaactgcacagcaagctttcagaggcagtgacatccgtgtcagtgtcggatgaagccatcacccagaccatgggccgctgctgggatgagaaccagtacttgctgtgcccccactcagcggtggccgtgaactaccattaccagcagatagacaggcagcagcccagcactccccggtgctgcctcgcccctgcctctgcagccaagttcccggaagctgtcctggctgctggcctgacccctgagactcccgcggagatcgtagccctggagcacaaggagacacgctgcaccctgatgcggagaggtgacaactggatgctgatgcttcgggacaccattgaggaccttagccgacagtggaggagtcatgccctcaacacctcccagtagcctggctggaggtggctttctttaggcttcagatcccaggaagatgcaccttctgagctgccttgtgcaccctccccattaagcgtaggttaggaggtttccgggaggctgctcagctggatctggagccagctggctttgctccgttccctggctagtctgtgcctggtcaccagggaggctgagtgaggggctgtgaacagttgccggaagcaccccctccctccccggcccgtgcagcagtgtctgagctgtagtgaaagtttcagggcctgcaaaagaagaggcttgggcacaggactgaccatggctccaggggtttaggacccccagacctgtgaaggtgggagcagctcaccaccttcacgcaggctttgtatgttctctgagccttagttgattttggcccccaaaccaaatccaaaggttctggcccaccttgtcagaggcttccaccctgctcacatgttgggaatccctggaataaaatgcttgttcagtgtgatgg

SEQ ID NO: 1470 - DNA, 296 bp, Artificial Sequence
  Description of Artificial sequences:primer
  misc_feature (1)..(296): 3' terminal sequence from clone image:682268. excision repair cross-complementing rodent repair deficiency, complementation group 4(ERCC4) gene.
gagggttctttctttggtagaagcccgttctttgttttgggggtctttaggtcttttgtgagatttcctaattctctttgaactgtcttccttcctaaatttcatccagacttcttcagctttgctatccttctcaaaggttttcctgtagagcctcaataagaaggcctccgctccaagagtgatatagtctctcagctgggaacatgttcggtcatcacttgcacaaatcagtacttgacctggaccaccaagagcttcactctccttattttctgcctcaatttcttttaata

SEQ ID NO: 1471 - DNA, 464 bp, Artificial Sequence
  Description of Artificial sequences:primer
  misc_feature (1)..(464): 5' terminal sequence from clone image:682268. excision repair cross-complementing rodent repair deficiency, complementation group 4(ERCC4) gene.
atacagactgctatactggacattttaaatgcatgtctaaaggaactaaaatgccataacccatcgcttgaagtggaagatttatcgtttagaaaatgctattggaaaaccttttgacaagacaatccgccattatctggatcctttgtggcaccagcttggagccaagactaaatccttagttcaggatttgaagatattacgaactttgctgcagtatctctctcagtatgattgtgtcacatttcttaatcttctggaatctctgagagcaacggaaaaagcttttggtcagaattcaggttggctgtttcttgactccagcacctcgatgtttataaatgctcgagcaagggtttatcatcttccagatgccaaaatgagtaaaaaagaaaaaatatctgaaaaaatggaaattaaagaaggggaagaaacaaaaaaggaactggtcctagaaagcaacc

SEQ ID NO: 1472 - DNA, 2751 bp, Artificial Sequence
  Description of Artificial sequences:primer
  misc_feature (1)..(2751): excision repair cross-complementing rodent repair deficiency, complementation group 4(ERCC4) gene.
atggagtcagggcagccggctcgacggattgccatggcgccgctgctggagtacgagcgacagctggtgctggaactgctcgacactgacgggctagtagtgtgcgcccgcgggctcggcgcggaccggctcctctaccactttctccagctgcactgccacccagcctgcctggtgctggtgctcaacacgcagccggccgaggaggagtattttatcaatcagctgaagatagaaggagttgaacacctccctcgccgtgtaacaaatgaaatcacaagcaacagtcgctatgaagtttacacacaaggtggtgttatatttgcgacaagtaggatacttgtggttgacttcttgactgatagaataccttcagatttaattactggcatcttggtgtatagagcccacagaataatcgagtcttgtcaagaagcattcatcttgcgcctctttcgccagaaaaacaaacgtggttttattaaagctttcacagacaatgctgttgcctttgatactggtttttgtcatgtggaaagagtgatgagaaatctttttgtgaggaaactgtatctgtggccaaggttccatgtagcagtaaactcatttttagaacagcacaaacctgaagttgtagaaatccatgtttctatgacacctaccatgcttgctatacagactgctatactggacattttaaatgcatgtctaaaggaactaaaatgccataacccatcgcttgaagtggaagatttatctttagaaaatgctattggaaaaccttttgacaagacaatccgccattatctggatcctttgtggcaccagcttggagccaagactaaatccttagttcaggatttgaagatattacgaactttgctgcagtatctctctcagtatgattgtgtcacatttcttaatcttctggaatctctgagagcaacggaaaaagcttttggtcagaattcaggttggctgtttcttgactccagcacctcgatgtttataaatgctcgagcaagggtttatcatcttccagatgccaaaatgagtaaaaaagaaaaaatatctgaaaaaatggaaattaaagaaggggaagaaacaaaaaaggaactggtcctagaaagcaacccaaagtgggaggcactgactgaagtattaaaagaaattgaggcagaaaataaggagagtgaagctcttggtggtccaggtcaagtactgatttgtgcaagtgatgaccgaacatgttcccagctgagagactatatcactcttggagcggaggccttcttattgaggctctacaggaaaacctttgagaaggatagcaaagctgaagaagtctggatgaaatttaggaaggaagacagttcaaagagaattaggaaatctcacaaaagacctaaagacccccaaaacaaagaacgggcttctaccaaagaaagaaccctcaaaaagaaaaaacggaagttgaccttaactcaaatggtaggaaaacctgaagaactggaagaggaaggagatgtcgaggaaggatatcgtcgagaaataagcagtagcccagaaagctgcccggaagaaattaagcatgaagaatttgatgtaaatttgtcatcggatgctgctttcggaatcctgaaagaacccctcactatcatccatccgcttctgggttgcagcgacccctatgctctgacaagggtactacatgaagtggagccaagatacgtggttctttatgacgcagagctaacctttgttcggcagcttgaaatttacagggcgagtaggcctgggaaacctctgagggtttactttcttatatacggaggttcaactgaggaacaacgctatctcactgctttgcggaaagaaaaggaagcttttgaaaaactcataagggaaaaagcaagcatggttgtccctgaagaaagagaaggcagagatgaaacaaacttagacctagtaagaggcacagcatctgcagatgtttccactgacactcggaaagccggtggccaggaacagaatggtacacagcaaagcatagttgtggatatgcgtgaatttcgaagtgagcttccatctctgatccatcgtcggggcattgacattgaacccgtgactttagaggttggagattacatcctcactccagaaatgtgcgtggagcgcaagagtatcagtgatttaatcggctctttaaataacggccgcctctacagccagtgcatctccatgtcccgctactacaagcgtcccgtgcttctgattgagtttgaccctagcaagcctttctctctcacttcccgaggtgccttgtttcaggagatctccagcaatgacattagttccaaactcactcttcttacacttcacttccccagactacggattctctggtgcccctctcctcatgcaacggcggagttgtttgaggagctgaaacaaagcaagccacagcctgatgcggcgacagcactggccattacagcagattctgaaacccttcccgagtcagagaagtataatcctggtccccaagacttcttgttaaaaatgccaggggtgaatgccaaaaactgccgctccttgatgcaccacgttaagaacatcgcagaattagcagccctgtcacaagacgagctcacgagtattctggggaatgctgcaaatgccaaacagctttatgatttcattcacacctcttttgcagaagtcgtatcaaaaggaaaagggaaaaagtga

SEQ ID NO: 1473 - DNA, 333 bp, Artificial Sequence
  Description of Artificial sequences:primer
  misc_feature (1)..(333): 3' terminal sequence from clone image:68227.
  misc_feature (16)..(16): n is a, c, g, or t
  misc_feature (51)..(51): n is a, c, g, or t
  misc_feature (287)..(287): n is a, c, g, or t
cttgcacagtgtcatntggcgacccatctgcattgaggcaggcagctgcanttcgttggcactgctgggcattcttcccttatatgaatatgttaataccacgatatagtatctgaagtccatgttgatgaacatttggatggtttttattttttgctattacaaacaacagcgctggtaacatccacttgccctcttccctctttcacatggcaccttcttgttcttgggaggtctcagctctaacaatgtaaccccaccaaccccccgctccagctaaatggggnttctctggtccccacatgtgcctcccaagctgggcttttgatgggt

SEQ ID NO: 1474 - DNA, 189 bp, Artificial Sequence
  Description of Artificial sequences:primer
  misc_feature (1)..(189): 5' terminal sequence from clone image:68227.
  misc_feature (149)..(149): n is a, c, g, or t
  misc_feature (184)..(184): n is a, c, g, or t
gtaaatctcagccaggcacaggtggctcacactttaatcccagtgctctgagaggccaagacaggaggattgctttaggccaggagttcgagaccagcctgggcaacatagtgagaccctgtgtctatattaaacattttaaaaacttnggcttgggcattggtgggttcaccgccttttagtncgcag

SEQ ID NO: 1475 - DNA, 285 bp, Artificial Sequence
  Description of Artificial sequences:primer
  misc_feature (1)..(285): 3' terminal sequence from clone image:68276. collagen, type v, alpha 1(COL5A1) gene.
  misc_feature (13)..(13): n is a, c, g, or t
  misc_feature (18)..(18): n is a, c, g, or t
  misc_feature (47)..(47): n is a, c, g, or t
  misc_feature (78)..(78): n is a, c, g, or t
  misc_feature (121)..(121): n is a, c, g, or t
  misc_feature (182)..(182): n is a, c, g, or t
  misc_feature (193)..(193): n is a, c, g, or t
  misc_feature (204)..(204): n is a, c, g, or t
  misc_feature (225)..(225): n is a, c, g, or t
  misc_feature (259)..(259): n is a, c, g, or t
ttttttttttgtncaaanataagaagtaattttattgcaatatactntggctagagtggtctggggagaacgggacanattttgaagttcagtacaaattataacaactttgaagggaccncagaggaagaaaatgacaggagaaaaggacaaattggatgggatgagaaatgaaaacagantcacatgaccnagacgcagccncgggggtcgcgggacagtccncggctatggcttttcttttgaagagatgaaggtnacagtcattggcacatgctggcatcc

SEQ ID NO: 1476 - DNA, 6496 bp, Artificial Sequence
  Description of Artificial sequences:primer
  misc_feature (1)..(6496): collagen, type v, alpha 1(COL5A1) gene.
cgcactctccgtccccgcggctggcgcaggacctcactcgagcggagcgcccacggggagcgggtcgcggggcggcggcggcgaggaggaggcgagaaggagttggaggaggaggaggaggaggcgagggcgagcgagcccagcggggtcccggccgccccgcgggccaaagtcgagccctcccgcccgtgggcgagcgcgccagccgccccttccagaacagccgccgccacaaagaagaacggggggtgccgaggtccccatgacctcctaaagtggtgcggtccctgctgagtgcgctgcccgggccgtgacccgcgcccctgtgcgtccccgcgcgcctccgagcgcccctgtgcgccccggcccgcgccccgccggcatggacgtccatacccgctggaaagcgcgcagcgcgctccgcccgggcgccccgctgctgcccccgctgctgctgctgctgctgtgggcgccgcctccgagccgcgcagctcagccagcagatctcctgaaggttctagattttcacaacttgcctgatggaataacaaagacaacaggcttttgcgccacgcggcgatcttccaaaggcccggatgtcgcttacagagtcaccaaagacgcgcagctcagcgcacccaccaagcagctgtaccctgcgtctgcatttcccgaggacttctccatcctaacaactgtgaaagccaagaaaggcagccaggccttcctggtctccatctacaacgagcagggtatccagcagattgggctggagctgggccgctctcccgtcttcctctacgaggaccacacggggaagcctggcccggaagactaccccctcttccggggcatcaacctgtcagatggcaagtggcacagaattgctctcagcgtccacaagaaaaatgtcaccttgatcctcgactgtaaaaagaagaccaccaaattcctcgaccgcagcgaccaccccatgatcgacatcaatggcatcatcgtgtttggcacccggatcctggatgaggaggtgtttgagggtgacatccagcagctgctctttgtctcggaccaccgggcagcttatgattactgtgagcactacagccctgactgtgacaccgcagtacctgacaccccacagtcgcaggaccccaatccagatgaatattacacggaaggagacggcgagggtgagacctattactacgaatacccctactacgaagaccccgaagacctagggaaggagcccacccccagcaagaagcccgtggaagctgccaaagaaaccacagaggtccccgaggagctgaccccgacccccacggaagctgctcccatgcctgaaaccagtgaaggggctgggaaggaagaggacgtcggcatcggggactatgactacgtgcccagtgaggactactacacgccctcaccgtatgatgacctcacctatggcgagggggaggagaaccctgaccagcccacagacccaggcgctggggccgaaattcccaccagcaccgccgacacctccaactcctccaatccagctccgcctccaggggaaggtgcggatgacttggagggggagttcactgaggaaacgatccggaaccttgacgagaactactacgacccctactacgaccccaccagctccccgtcggagatcgggccgggaatgccggcgaaccaggataccatctatgaagggattggaggacctcggggcgagaaaggccaaaagggagaaccagcgattatcgagccgggcatgctcatcgagggcccgcctggcccagaaggccccgcgggtcttcccggacctccaggaaccatgggtcccactggccaagtcggggaccctggagaaaggggcccccctggacgcccaggccttcctggggccgatggcctgcccggtcctccaggaaccatgctcatgctgcccttccggtttggaggtggcggcgatgcgggctccaaaggccccatggtctcagcccaggagtcccaggcgcaagccattctccagcaggccaggttggcactgaggggaccagctggcccgatgggtctcacagggagacctggccctgtgggtccccctgggagcggaggtttgaagggcgagccgggagacgtggggcctcagggtcctcgaggtgtgcaaggcccgcctggtccggccgggaagcccggaagacggggtcgggctgggagtgatggagccagaggaatgcctggacaaactggccccaagggtgaccggggtttcgacggcctggctgggttgccaggcgagaagggccacaggggtgaccctggtccttccggcccaccaggacctccgggagacgatggagaaaggggtgacgacggagaagttgggcccagggggctgcctggggagcccgggccacgtggtctgcttgggccgaaagggcccccaggtcctcccggacctcccggtgtcacgggtatggacggccagccggggccaaaaggaaatgtgggtccccagggagagcctggccccccaggacagcagggtaatccaggcgcccagggtcttccaggcccccagggtgcaattggtcctccaggagaaaagggtcccttggggaaaccaggccttccaggaatgcccggtgctgacggacccccgggacaccctggcaaagaaggccctccaggagagaaaggaggtcagggtccacctggcccccagggtccgattggctacccaggtcctcgaggagtcaagggggccgatggcatccgtggtctgaagggcacaaagggcgagaagggtgaagacggctttcctgggtttaaaggagacatgggcatcaagggtgatcggggggagatcggcccacccggtcccaggggagaagatggccctgaaggcccaaagggtcgcggaggtcccaatggtgaccccggtcctctgggaccccctggggagaagggaaaactcggagtcccagggttaccagggtatccaggaagacaaggaccaaagggctctattggattccctggatttcctggcgccaatggagagaagggcggcagggggacccctggaaagccaggaccgcgggggcagcgaggcccaacgggtccgaggggtgaaagaggcccccggggcatcactgggaagcctggccccaagggcaactccggaggtgacggcccagctggccctcctggtgaacggggacccaatggaccccaaggacccacaggatttcctggaccaaagggcccccctggccctccaggcaaggatggactcccaggacaccctggacagagaggcgagactggtttccaaggcaagaccggccctccaggcccccccggcgtggtcggccctcagggtcccacgggagaaacgggcccaatgggtgagcgtggccaccctgggccccctggaccccccggtgaacaggggcttccgggccttgctggaaaagaagggacgaagggtgacccaggccctgcaggcctccctgggaaagatggccctccaggattacgtggtttccctggggaccgagggcttcctggtccagtgggagctcttggactgaaaggcaatgaagggccccctggcccaccaggccctgcgggatctccaggggagagaggtccagctggagccgctgggcccatcggaattccagggagacctgggccccagggacccccagggccggcaggagagaaaggggctcctggcgagaaaggcccacaaggcccagctggccgagacggtctccaggggcctgtggggctcccgggtccagctggccctgtgggtccccctggagaagacggagataagggagagatcggggagccggggcagaaaggaagcaagggggacaaaggagaacagggtcctcctgggcctacaggtcctcaaggccccatcggacagccaggcccctctggagctgacggcgagccggggcctcggggccagcagggccttttcgggcagaaaggtgatgaaggtcccagaggctttcctggaccccctgggccagtggggctgcagggtttgccaggacctccaggcgagaagggtgagacaggagacgtgggccagatgggccccccgggtccccctggcccccgaggaccctccggagctccaggtgctgatggcccacaaggtcccccaggtggaataggaaaccctggtgcagtgggagagaagggcgagcctggcgaagcaggtgagcctggcccttccgggagaagcggccccccgggacccaaaggagaaaggggagagaagggcgagtcaggcccttcaggtgctgccggaccccctggacccaaaggccctcccggagatgatggtcccaaaggcagccctggcccagtgggttttcctggagatcctggcccccccggagagcctggccccgcgggtcaagatggtccccctggtgacaaaggagatgatggtgaacccgggcagacgggatcccccggccctactggtgaaccaggtccatcggggcctccaggaaaaaggggtcccccaggccccgcaggccccgaaggcagacagggagagaaaggggccaagggagaagccggcttggaaggccctcctgggaagactggccccatcggcccccagggggcccctgggaagcccggaccggatggccttcgagggatccctggccctgtgggagaacaaggtctcccaggatccccaggcccggacggtccccccggccccatgggtcccccaggacttcccggcctcaaaggagattctggtcccaaaggtgaaaagggtcatccaggcctgatcgggctcatcggtcctccgggtgaacagggtgagaagggcgaccgtggtctccctggcccccagggctcctccggtcctaagggagaacagggtatcactggtccttctggcccgattgggcctcctgggccccctggcctgccgggtccgcctggtccaaaaggtgctaagggctcctcgggtccaactggcccgaagggtgaggcaggccacccaggacccccaggccccccgggccccccgggagaggtcatccagcccctgccaatccaggcatccaggacgcggcggaacatcgacgccagccagctgctggacgacgggaatggcgagaactacgtggactacgcggacggcatggaagagatcttcggctctctcaactctctgaagctggagattgagcagatgaaacggcccctgggcacgcagcagaaccccgcccgcacctgcaaggacctgcagctctgccaccccgacttcccagatggtgaatactgggtcgatcctaaccaaggatgctccagggattccttcaaggtttactgcaacttcacagccggggggtcgacatgcgtcttccctgacaagaagtccgaaggggccagaatcacttcttggcccaaagaaaacccgggctcctggttcagtgaattcaagcgtgggaaactgctctcctatgtggacgccgagggcaaccctgtgggtgtggtacagatgaccttcctgcggctgctgagcgcctctgcccaccagaacgtcacctaccactgctaccagtcagtggcctggcaggacgcagccacgggcagctacgacaaggccctccgcttcctgggctccaacgacgaggagatgtcctatgacaacaacccctacatccgcgccctggtggacggctgtgctaccaagaaaggctaccagaagacggttctggagatcgacacccccaaagtggagcaggtgcccatcgtggacatcatgttcaatgacttcggtgaagcgtcacagaaatttggatttgaagtggggccggcttgcttcatgggctaggagccgccgagcccgggctcccgagccgaattcagcaacctcgtacctcagcatgccattgcttcgtgagtgtcccgtgcacgtcctgatcctggacagtgaaggcttctccctcccctcccacctgacttcatctacgcctcggcaccacggggtgtgggaccccagcccggagagaacagagggaaggagccgcgcccccacctggagctgaatcacatgacctagctgcaccccagcgcctgggcccgccccacgctctgtccacacccatgcgccccgggagcggggccatgcctccagccccccagctcgcccgacccatcctgttcgtgaataggtctcaggggttgggggagggactgccagatttggacactatatttttttctaaattcaacttgaagatgtgtatttcccctgaccttcaaaaaatgttccaaggtaagcctcgtaaaggtcatcccaccatcaccaaagcctccgtttttaacaacctccaacacgatccatttagaggccaaatgtcattctgcaggtgccttcccgatggattaaaggtgcttatgtttttgtgagttttaagtaaatatttgt

SEQ ID NO: 1477 - DNA, 380 bp, Artificial Sequence
  Description of Artificial sequences:primer
  misc_feature (1)..(380): 3' terminal sequence from clone image:68351. myomesin 1 (skelemin) 185kda(MYOM1) gene.
  misc_feature (302)..(302): n is a, c, g, or t
gggtggtcttgaactcctgacttcaagtcatcctcctgccttggctctcaaggtgttgggattacaggcataagcaccatgcccaactcccttcattccttttaaaaggctcattcatctagagtaaatttgaatctgcaaaatatctgtttaccttgtccagagagatccactgtcttctgatgtccagttttgccatcaaagagctccatgacatacttccctttgtcattcggggtgggctcgttgatttgtagccagatctgctctccagtgaccccggtcttaactctgtctgaggnacctaatgggcggacccattgtggggaccagttaactttcaaatcctccacatagtaagttacaaaagagtacagttg

SEQ ID NO: 1478 - DNA, 4949 bp, Artificial Sequence
  Description of Artificial sequences:primer
  misc_feature (1)..(4949): myomesin 1 (skelemin) 185kda(MYOM1) gene.
cggacagattccagtctgctgttagatgattattcatccaagttgagccccaaaccaaagagagccaagcacagcctactgtctggagaagagaaagaaaatttgcccagtgactacatggtacccattttctcaggacgtcaaaagcatgtcagtggaattactgatacggaagaagaaagaattaaggaagctgctgcttatatagcccagaggaatcttcttgctagtgaggaaggaatcacaacacctaaacagtccacggcatccaagcagaccacggcatctaagcagtccacggcatccaagcagtccacagcatccaagcagtccacggcatccaggcagtccacggcatccaggcagtctgtggtttccaaacaggccacatccgctcttcaacaggaagaaacttctgaaaagaagtcaaggaaagttgtgattcgaggaaaggcagaacgcctgtccctgaggaaaacattagaagaaaccgagacatatcatgccaagctgaatgaagaccatcttctccatgctcctgagtttatcattaaacctcgctcccacacggtttgggagaaggagaatgtaaaattgcattgctccatagcaggatggccagaacctcgtgtcacgtggtataaaaaccaggtgccaataaatgtccatgcaaaccctggaaagtatattattgagagtcgatatggaatgcacactctggagattaatgcatgtgattttgaagatacagctcagtaccgggcctcggcgatgaatgttaaaggagagctttcggcatatgcttcagttgtggtaaaaaggtataagggagagtttgatgagactcgcttccatgctggggcttccaccatgcccctcagctttggtgtgaccccatatggttatgcatcccggtttgagatccactttgatgacaaatttgatgtgtcttttgggagagagggagagacaatgagtctaggctgtcgtgttgtcatcactcctgaaattaaacatttccagccagagatccggtggtacagaaatggagtacctctttctccatcaaaatgggtgcaaacactttggagtggagagcgggcaacgctgacattttcccatctcaacaaagaagatgaaggcctctatacaatccgtgtacggatgggagaatattatgaacaatatagtgcttatgtctttgttcgagatgctgatgcagagattgaaggagccccagctgctcccttggatgtgaagtgcttggaggccaacaaagattatatcatcatctcctggaaacagccagctgtcgatggagggagtcctattctcggatattttattgataagtgtgaggtgggcacagatagctggtcgcagtgcaatgacacacctgtgaagtttgctcgttttcctgtcactggattgatcgaaggtcgttcctatatcttccgagttcgagctgtgaataaaatgggaataggtttcccatctcgagtttccgaggccgtggctgctctggatccggctgagaaagctagactaaagtcgcccctcagcaccctggactggacagtcattgttactgaagaggaaccttcagagggtattgtgcctggccccccgacagacctctctgtcactgaggccacccggagctatgtggtgctcagctggaagccccctggccagcgtggtcatgagggcattatgtactttgtggaaaagtgtgaggcaggaacagaaaactggcagcgagtgaacacggagctccctgtgaagtctccccgctttgctctgtttgacttggccgaggggaaatcctactgtttccgtgtccgctgttctaattctgcaggagttggtgagccctcagaggcaacggaggtgactgtggtaggggacaaacttgatatccccaaggctcctggcaaaatcatcccaagcagaaacacagacacctcagtggtagtttcgtgggaggagtccaaagatgccaaagagctggtcgggtactacatagaggcaaacgttgctggctctggcaagtgggagccctgtaacaacaaccccgtgaaaactcaccgattcacttgtcatggattagtgactggtcagagttatatattccgggtcagagcagtcaatgcagctggacttagtgaatattcccaggattcagaagctattgaagtcaaagctgctattgcaccaccatctccaccctgtgatatcacctgtcttgaaagttttcgtgactcaatggttcttggatggaagcaaccagataagactggaggggcagaaattactggctattatgtgaactatcgcgaggtcattgatggggtaccaggaaaatggagagaagccaatgtcaaggctgtcagagaggaggcatacaagattagcaacttgaaggaaaacatggtgtatcagttccaagtggcagccatgaacatggctgggctgggcgcgccctccgcagtaagcgaatgcttcaaatgtgaagagtggaccatcgccgtcccaggaccaccgcacagtctcaagtgtagtgaagtcaggaaagactcactggttctccagtggaagccgccagtccactccgggcggactccggtcactggttacttcgtggacttgaaggagaaggccaaagaagaccagtggcgagggctcaatgaggcggctattaaaaacgtatacctgaaggttcgaggcctcaaggagggcgtcagctacgtgttccgtgttcgagccataaaccaggcgggagttgggaagccatctgaccttgctggccctgttgtggcagagacccgtccaggaaggaaagaggttgttgtaaatgtggatgatgatggagtcatttcattgaacttcgagtgtgataagatgactccaaagtccgagttctcctggtccaaagattatgtatccactgaggactctccacgattggaagtcgaaagcaagggcaacaagacgaaaatgaccttcaaagaccttgggatggatgacttgggtatttactcttgcgatgtaacagacactgatggaatagcatcaagctacttaatagatgaggaagaattgaaacgtttacttgctctcagccatgaacacaagttcccaactgtcccagttaaatcagagttggcagttgaaattttggagaaaggccaggtccggttttggatgcaggctgagaaactgtctggcaatgccaaagtcaactacatatttaacgagaaggaaatttttgaaggcccgaaatataaaatgcatattgaccgaaacactggcatcatcgaaatgttcatggaaaagctacaggatgaggatgagggaacgtacactttccagcttcaagatggaaaagcaactaaccattctactgttgttctcgttggagatgttttcaaaaagctccagaaagaagctgaattccagcggcaagaatggatcaggaaacaaggtcctcactttgttgagtatttgagctgggaagtgactggtgaatgtaatgtactattgaaatgcaaggtggcaaatattaagaaggagactcatattgtgtggtacaaagatgagagggagatatcagtggatgaaaagcatgactttaaggatggtatatgtaccctgcttataacagagttttccaagaaagatgctgggatttatgaagttatcctgaaagatgaccgaggaaaagataagagcagactgaagcttgtggatgaagcctttaaggaactgatgatggaagtatgcaaaaaaatagctttgtctgctacagacctgaaaatccagagcacagccgagggcatccaactgtactcttttgtaacttactatgtggaggatttgaaagttaactggtcccacaatgggtccgccattaggtactcagacagagttaagaccggggtcactggagagcagatctggctacaaatcaacgagcccaccccgaatgacaaagggaagtatgtcatggagctctttgatggcaaaactggacatcagaagacagtggatctctctggacaagcatacgatgaggcctatgctgaattccagaggttgaaacaagctgccattgccgagaaaaatcgtgcccgggtgttgggaggtctcccagacgtggtcaccatccaggaggggaaggcccttaatctcacttgcaacgtgtggggagacccgcctccggaggtgtcgtggttgaagaacgagaaggccctggctcagacggaccactgcaacctcaagttcgaggctgggaggaccgcgtacttcaccatcaacggtgtgagcaccgctgactcgggcaaatacgggctggttgtgaagaacaagtatggctcggagaccagcgacttcaccgtcagcgtgttcatcccagaggaggaggcgaggatggccgccttggagtccctgaaaggtggcaagaaggccaagtgaccggaggtgcgaggagagcagccggcctgtgtgacttgggtgtgaatggtttgggttaaggatgagacgtccttcatgcttctcctccctattatttctggcttgagggaaataatgtcaggtctttcactcatataaaaaagcaccaactaatgacactttaattgtttttctttatctacaaaattatgtgttaagaaaataccattcatagcatgaagattaggaaacagttttaaggagaagacttgaatgaagttggagggacattgaatgatggtcagagggcagacgaatgtgtcgtggggcggaattgggatttgctgcagctgtgaagccatggccgtgtctcgtgtgttgttacagaggtgatgtgcttttcgacgggccctcgtggcttggaacctcctctgtatgaataaacagttttcacgtctgtcctcttccccgaaaaaaaaaaaaaaaaaaaaaaaaaa

SEQ ID NO: 1479 - DNA, 425 bp, Artificial Sequence
  Description of Artificial sequences:primer
  misc_feature (1)..(425): 3' terminal sequence from clone image:69584. nima (never in mitosis gene a)-related kinase 6(NEK6) gene.
  misc_feature (140)..(140): n is a, c, g, or t
tttttttttaaaaaatgatttccactttatccctttacaacagagtaaattaagcacacagcttgattgaaaagataccaagaactaaactgaacccggtactaaccattttcaaaggctcactacacaaatcacacggnctcctgcaagtctcctgttagcataagccttgacaggtcactggaggaattaccctaaagattcacattacaatccagatacagggggctgccgtggctcgctgaaccacctgcccttattgacccagctgagattgtccacaacagtatagaggaaagggactttgggaatctggaccatcagtggacatgtgggccagcgcccctcccttcaggctgctctgcctttcagcatctgctggtaagggctggggcagccttttggggggaacctggctggaaccc

SEQ ID NO: 1480 - DNA, 2605 bp, Artificial Sequence
  Description of Artificial sequences:primer
  misc_feature (1)..(2605): nima (never in mitosis gene a)-related kinase 6(NEK6) gene.
ggcacgaggccgagctgacgggcgtgcggccgctgcgccgcaaactcgtgtgggaggcaccgctccagccgcccgcgggccagcgcaccggtcccccagcggcagccgagcccgcccgcgcgccgttcgtgccctcgtgaggctggcatgcaggatggcaggacagcccggccacatgccccatggagggagttccaacaacctctgccacaccctggggcctgtgcatcctcctgacccacagaggcatcccaacacgctgtcttttcgctgctcgctggcggacttccagatcgaaaagaagataggccgaggacagttcagcgaggtgtacaaggccacctgcctgctggacaggaagacagtggctctgaagaaggtgcagatctttgagatgatggacgccaaggcgaggcaggactgtgtcaaggagatcggcctcttgaagcaactgaaccacccaaatatcatcaagtatttggactcgtttatcgaagacaacgagctgaacattgtgctggagttggctgacgcaggggacctctcgcagatgatcaagtactttaagaagcagaagcggctcatcccggagaggacagtatggaagtactttgtgcagctgtgcagcgccgtggagcacatgcattcacgccgggtgatgcaccgagacatcaagcctgccaacgtgttcatcacagccacgggcgtcgtgaagctcggtgaccttggtctgggccgcttcttcagctctgagaccaccgcagcccactccctagtggggacgccctactacatgtcaccggagaggatccatgagaacggctacaacttcaagtccgacatctggtccttgggctgtctgctgtacgagatggcagccctccagagccccttctatggagataagatgaatctcttctccctgtgccagaagatcgagcagtgtgactaccccccactccccggggagcactactccgagaagttacgagaactggtcagcatgtgcatctgccctgacccccaccagagacctgacatcggatacgtgcaccaggtggccaagcagatgcacatctggatgtccagcacctgagcgtggatgcaccgtgccttatcaaagccagcaccactttgccttacttgagtcgtcttctcttcgagtggccacctggtagcctagaacagctaagaccacagggttcagcaggttccccaaaaggctgcccagccttacagcagatgctgaaggcagagcagctgagggaggggcgctggccacatgtcactgatggtcagattccaaagtcctttctttatactgttgtggacaatctcagctgggtcaataagggcaggtggttcagcgagccacggcagccccctgtatctggattgtaatgtgaatctttagggtaattcctccagtgacctgtcaaggcttatgctaacaggagacttgcaggagaccgtgtgatttgtgtagtgagcctttgaaaatggttagtaccgggttcagtttagttcttggtatcttttcaatcaagctgtgtgcttaatttactctgttgtaaagggataaagtggaaatcatttttttccgtggagtggtgattctgctaacatttttatctacgttttataacttggtgagtgacgatgagagccctgcacctggccagagtgtcacaggcaaaaggcatcgggaagcaggagcatcttcttggcagccaggctgggccatcttctcctggacacctgctgtgtaccaggaacttcgtcacctccttgaatgctggcggttcatttcatgatcagtgttaagcattttcctccatgggaaggaagcatgggatatagaaaagcgaagggctgtcctttacaaattctggttctgcaacttcctagcgtgactttgggcttgggcaagtttcttagccgttctgagccttcatttcctcatctgtacaatgagattaatagtacctatcatctaccttcaggattgctgacagacagaatttgaaataaaatatgcaagttagctaatacaaaaagtagatgatccaaaaatggtagccactcacccttcacaaactgaagtccatggaccacggaagtcgagaattaatgtacacctgtatcatgtgtaggaaaccagaaatgtgttccttatttcttgttcccaaacaggattaactgtgaagactaatttataaatgtgaacctaagaaaactccacctctgaaggaaatcatttgaattttgtttttgtacgtaaagttaaccttccaattgtctgagctgtcgtcactgacttcatgacagtctggccctccagacaagagcagcgctggcatcgggcaggtgattcctgacacctgctgcctgcaggcattcactgaccaggcctttcctggaggaaacacccagggccgggcggctgctgtttccacacgtggactcggatctgctgtgacaccgtcagcccgacagtctctccatatgcagcctttcctctgtacttttctccatggttgaaataaaacagggtgactgggagttacttagaattcatgaagattttaaaaaaaaaaaaaaaaaa

SEQ ID NO: 1481 - DNA, 441 bp, Artificial Sequence
  Description of Artificial sequences:primer
  misc_feature (1)..(441): 3' terminal sequence from clone image:70825. ribosomal protein s23(RPS23) gene.
  misc_feature (293)..(293): n is a, c, g, or t
ttggcatatgaaagtttattactacagtgttttcaccattaatatttatgatcttggtctttccttcttgcctttgtatagggccaaaagagaaacattggctactttgacaaccttaaagcggactccaggaatatcaccaacagcatgacctttgcgaccaaatccagcaaccagaacttcatcattttcctcaataaagttcaagcaaccgtcattggggtacaaaggctgtgattttcttgccattcttgatcagctgggacccttacacacttcctaatgggcaggantttgggctgtttgggcttcaactcctactttttccaggcacggattccttttgcatgaggaaggcacctccaaaggggttgggcctttgggggctgtgcccaaaatgaggctttccttatactggttttatcatggccacttctgggg

SEQ ID NO: 1482 - DNA, 365 bp, Artificial Sequence
  Description of Artificial sequences:primer
  misc_feature (1)..(365): 5' terminal sequence from clone image:70825. ribosomal protein s23(RPS23) gene.
  misc_feature (119)..(119): n is a, c, g, or t
  misc_feature (333)..(333): n is a, c, g, or t
ggcgccgacagatgggcaagtgtcgtggacttcgtactgctaggaagctccgtagtcaccgacgagaccagaagtggcatgataaacagtataagaaagctcatttgggcacagcctanaaggccaacccttttggaggtgcttctcatgcaaaaggaatcgtgctggaaaaagtaggagttgaagccaaacagccaaattctgccattaggaagtgtgtaagggtccagcttgatcaagaatggcaagaaaatcacagcctttgttaccccaattgacggtttgctttgaacttttttttgagggaaaattgattgaagtttcttggtttgntgggttttgggtcgccaaaggttcatgctgtt

SEQ ID NO: 1483 - DNA, 506 bp, Artificial Sequence
  Description of Artificial sequences:primer
  misc_feature (1)..(506): ribosomal protein s23(RPS23) gene.
ctctttcgctcaggcccgtggcgccgacaggatgggcaagtgtcgtggacttcgtactgctaggaagctccgtagtcaccgacgagaccagaagtggcatgataaacagtataagaaagctcatttgggcacagccctaaaggccaacccttttggaggtgcttctcatgcaaaaggaatcgtgctggaaaaagtaggagttgaagccaaacagccaaattctgccattaggaagtgtgtaagggtccagctgatcaagaatggcaagaaaatcacagcctttgtacccaatgacggttgcttgaactttattgaggaaaatgatgaagttctggttgctggatttggtcgcaaaggtcatgctgttggtgatattcctggagtccgctttaaggttgtcaaagtagccaatgtttctcttttggccctatacaaaggcaagaaggaaagaccaagatcataaatattaatggtgaaaacactgtagtaataaattttcatatgcc

SEQ ID NO: 1484 - DNA, 194 bp, Artificial Sequence
  Description of Artificial sequences:primer
  misc_feature (1)..(194): 3' terminal sequence from clone image:71096. ribosomal protein l5(RPL5) gene.
  misc_feature (7)..(8): n is a, c, g, or t
  misc_feature (11)..(11): n is a, c, g, or t
  misc_feature (147)..(147): n is a, c, g, or t
tgttcannagnttattatctatatctgaaaaaatcatagaaaattgctgggtttagctctcagcagcccgcctcctgagctctgaggaagcttccttcttttgagctcccgatcccttcttctgagcaagggcattttgggacggtncacctcttctttttaacttctttcttgggcttcttttcatagactgg

SEQ ID NO: 1485 - DNA, 223 bp, Artificial Sequence
  Description of Artificial sequences:primer
  misc_feature (1)..(223): 5' terminal sequence from clone image:71096. ribosomal protein l5(RPL5) gene.
ctcatgcctgctatacgagagaatccagtctatgaaaagaagcccaagaaagaagttaaaaagaagaggtggaaccgtcccaaaatgtcccttgctcagaagaaggatcgggtagctcaaaagaaggcaagcttcctcagagctcaggagcgggctgctgagagctaaacccagcaattttctatgattttttcagatatagataataaacttatgaacagca

SEQ ID NO: 1486 - DNA, 364 bp, Artificial Sequence
  Description of Artificial sequences:primer
  misc_feature (1)..(364): 3' terminal sequence from clone image:712675. heat shock transcription factor 1(HSF1) gene.
  misc_feature (3)..(3): n is a, c, g, or t
  misc_feature (70)..(70): n is a, c, g, or t
cgnccgctccctccgcctattccctccttgctcgagatggatctgcccgtccccccggcgcggcggccgnccacacgtcccgcgccttcctgaccaagctgtggaccctcgtgagcgacccggacaccgacgcgctcatctgctggagcccgagccggaacagcttccacgtgttcgaccaggggcagtttgccaaaggaggtgctgcccaattactttcaagcacaacaccatggccagtttcgtgcggcagtcaacatgtatggcttccggaaagtggtccacatcgagcagggcggcctggtcaagccagagagagacgacacggagttccagcacccatgcttccctgcgttggccagga

SEQ ID NO: 1487 - DNA, 321 bp, Artificial Sequence
  Description of Artificial sequences:primer
  misc_feature (1)..(321): 5' terminal sequence from clone image:712675. heat shock transcription factor 1(HSF1) gene.
gattcggcactgaggggagacggtattgtgagcactcccgctggtctcgttccccctcaccccccgcccgcctacgcacactggccaggctgctgtcaaggtcaggcaggctcatgtcggagatgatgggtccagagctggccacagcatcaggggcgtagaggctggagctgctgtaggctggggagggggccgagtaggggccggagcggtggacgtgctccagggagaacttgccggctatactttgggcaatggaatgtgcttaagccacttgtcgttccaccatcaggggggatccttctcctcagcccccaggat

SEQ ID NO: 1488 - DNA, 2156 bp, Artificial Sequence
  Description of Artificial sequences:primer
  misc_feature (1)..(2156): heat shock transcription factor 1(HSF1) gene.
cgggcccgttgcaagatggcggcggccatgctgggccccggggctgtgtgtgcgcagcgggcggcggcgcggcccggaaggctggcgcggcgacggcgttagcccggccctcggcccctctttgcggccgctccctccgcctattccctccttgctcgagatggatctgcccgtgggccccggcgcggcggggcccagcaacgtcccggccttcctgaccaagctgtggaccctcgtgagcgacccggacaccgacgcgctcatctgctggagcccgagcgggaacagcttccacgtgttcgaccagggccagtttgccaaggaggtgctgcccaagtacttcaagcacaacaacatggccagcttcgtgcggcagctcaacatgtatggcttccggaaagtggtccacatcgagcagggcggcctggtcaagccagagagagacgacacggagttccagcacccatgcttcctgcgtggccaggagcagctccttgagaacatcaagaggaaagtgaccagtgtgtccaccctgaagagtgaagacataaagatccgccaggacagcgtcaccaagctgctgacggacgtgcagctgatgaaggggaagcaggagtgcatggactccaagctcctggccatgaagcatgagaatgaggctctgtggcgggaggtggccagccttcggcagaagcatgcccagcaacagaaagtcgtcaacaagctcattcagttcctgatctcactggtgcagtcaaaccggatcctgggggtgaagagaaagatccccctgatgctgaacgacagtggctcagcacattccatgcccaagtatagccggcagttctccctggagcacgtccacggctcgggcccctactcggccccctccccagcctacagcagctccagcctctacgcccctgatgctgtggccagctctggacccatcatctccgacatcaccgagctggctcctgccagccccatggcctcccccggcgggagcatagacgagaggcccctatccagcagccccctggtgcgtgtcaaggaggagccccccagcccgcctcagagcccccgggtagaggaggcgagtcccgggcgcccatcttccgtggacaccctcttgtccccgaccgccctcattgactccatcctgcgggagagtgaacctgcccccgcctccgtcacagccctcacggacgccaggggccacacggacaccgagggccggcctccctcccccccgcccacctccacccctgaaaagtgcctcagcgtagcctgcctggacaagaatgagctcagtgaccacttggatgctatggactccaacctggataacctgcagaccatgctgagcagccacggcttcagcgtggacaccagtgccctgctggacctgttcagcccctcggtgaccgtgcccgacatgagcctgcctgaccttgacagcagcctggccagtatccaagagctcctgtctccccaggagccccccaggcctcccgaggcagagaacagcagcccggattcagggaagcagctggtgcactacacagcgcagccgctgttcctgctggaccccggctccgtggacaccgggagcaacgacctgccggtgctgtttgagctgggagagggctcctacttctccgaaggggacggcttcgccgaggaccccaccatctccctgctgacaggctcggagcctcccaaagccaaggaccccactgtctcctagaggccccggaggagctgggccagccgcccacccccacccccagtgcagggctggtcttggggaggcagggcagcctcgcggtcttgggcactggtgggtcggccgccatagccccagtaggacaaacgggctcgggtctgggcagcacctctggtcaggagggtcaccctggcctgccagtctgccttcccccaaccccgtgtcctgtggtttggttggggcttcacagccacacctggactgaccctgcaggttgttcatagtcagaattgtattttggatttttacacaactgtcccgttccccgctccacagagatacacagatatatacacacagtggatggacggacaagacaggcagagatctataaacagacaggctctaaaaaaaaaaaaaaaaaaaa

SEQ ID NO: 1489 - DNA, 478 bp, Artificial Sequence
  Description of Artificial sequences:primer
  misc_feature (1)..(478): 3' terminal sequence from clone image:713218. fk506 binding protein 12-rapamycin associated protein 1(FRAP1) gene.
gaaccaactttctagctgctgttgaagaatatattgtcagagacacaaggcttgatttggttcccaggacagtgaaacatagtaataccacgtaaatcaagccattcattttggggaacagaagatccataactttagaaatacgggttttgacttaactcacaagagaactcatcataagtacttgctgatggaagaatgacctagttgctcctctcaacatgggtacagcaaactcagcacagccaagaagcctcaggtcgtggagaacatggattaggatcctagactgtaaagacacagaagatgctgacctcacccctgccacctatcccaagacctcactggtctgtggacagcagcagaaatgtttgcaagataggccaaaatgagtacaaaaggtctgtcttccatcagacccagtgatgctgcgactcacacgcttcaattcaagacctgaccgctagtagggaggttt

SEQ ID NO: 1490 - DNA, 318 bp, Artificial Sequence
  Description of Artificial sequences:primer
  misc_feature (1)..(318): 5' terminal sequence from clone image:713218. fk506 binding protein 12-rapamycin associated protein 1(FRAP1) gene.
tacatatgtttaaaattctgatgtcatttattggcacaaaaattattctgatacaacatggtgtctagacatggctacactttatactttgtgcatttagttgagtatttgttctgctcataatttccaatatgtaccagaccttccctgtgttcagcacctccatgacagtatttctgttttctgagcccttgctctaaacagagtattttgaccactgaaaacatcccagaaccctgctgcagaaggccagtgagggtggtcccactgcacagtgatcccctctgtgcatctgctcagccgaggctgccagcgatc

SEQ ID NO: 1491 - DNA, 8680 bp, Artificial Sequence
  Description of Artificial sequences:primer
  misc_feature (1)..(8680): fk506 binding protein 12-rapamycin associated protein 1(FRAP1) gene.
acggggcctgaagcggcggtaccggtgctggcggcggcagctgaggccttggccgaagccgcgcgaacctcagggcaagatgcttggaaccggacctgccgccgccaccaccgctgccaccacatctagcaatgtgagcgtcctgcagcagtttgccagtggcctaaagagccggaatgaggaaaccagggccaaagccgccaaggagctccagcactatgtcaccatggaactccgagagatgagtcaagaggagtctactcgcttctatgaccaactgaaccatcacatttttgaattggtttccagctcagatgccaatgagaggaaaggtggcatcttggccatagctagcctcataggagtggaaggtgggaatgccacccgaattggcagatttgccaactatcttcggaacctcctcccctccaatgacccagttgtcatggaaatggcatccaaggccattggccgtcttgccatggcaggggacacttttaccgctgagtacgtggaatttgaggtgaagcgagccctggaatggctgggtgctgaccgcaatgagggccggagacatgcagctgtcctggttctccgtgagctggccatcagcgtccctaccttcttcttccagcaagtgcaacccttctttgacaacatttttgtggccgtgtgggaccccaaacaggccatccgtgagggagctgtagccgcccttcgtgcctgtctgattctcacaacccagcgtgagccgaaggagatgcagaagcctcagtggtacaggcacacatttgaagaagcagagaagggatttgatgagaccttggccaaagagaagggcatgaatcgggatgatcggatccatggagccttgttgatccttaacgagctggtccgaatcagcagcatggagggagagcgtctgagagaagaaatggaagaaatcacacagcagcagctggtacacgacaagtactgcaaagatctcatgggcttcggaacaaaacctcgtcacattacccccttcaccagtttccaggctgtacagccccagcagtcaaatgccttggtggggctgctggggtacagctctcaccaaggcctcatgggatttgggacctcccccagtccagctaagtccaccctggtggagagccggtgttgcagagacttgatggaggagaaatttgatcaggtgtgccagtgggtgctgaaatgcaggaatagcaagaactcgctgatccaaatgacaatccttaatttgttgccccgcttggctgcattccgaccttctgccttcacagatacccagtatctccaagataccatgaaccatgtcctaagctgtgtcaagaaggagaaggaacgtacagcggccttccaagccctggggctactttctgtggctgtgaggtctgagtttaaggtctatttgcctcgcgtgctggacatcatccgagcggccctgcccccaaaggacttcgcccataagaggcagaaggcaatgcaggtggatgccacagtcttcacttgcatcagcatgctggctcgagcaatggggccaggcatccagcaggatatcaaggagctgctggagcccatgctggcagtgggactaagccctgccctcactgcagtgctctacgacctgagccgtcagattccacagctaaagaaggacattcaagatgggctactgaaaatgctgtccctggtccttatgcacaaaccccttcgccacccaggcatgcccaagggcctggcccatcagctggcctctcctggcctcacgaccctccctgaggccagcgatgtgggcagcatcactcttgccctccgaacgcttggcagctttgaatttgaaggccactctctgacccaatttgttcgccactgtgcggatcatttcctgaacagtgagcacaaggagatccgcatggaggctgcccgcacctgctcccgcctgctcacaccctccatccacctcatcagtggccatgctcatgtggttagccagaccgcagtgcaagtggtggcagatgtgcttagcaaactgctcgtagttgggataacagatcctgaccctgacattcgctactgtgtcttggcgtccctggacgagcgctttgatgcacacctggcccaggcggagaacttgcaggccttgtttgtggctctgaatgaccaggtgtttgagatccgggagctggccatctgcactgtgggccgactcagtagcatgaaccctgcctttgtcatgcctttcctgcgcaagatgctcatccagattttgacagagttggagcacagtgggattggaagaatcaaagagcagagtgcccgcatgctggggcacctggtctccaatgccccccgactcatccgcccctacatggagcctattctgaaggcattaattttgaaactgaaagatccagaccctgatccaaacccaggtgtgatcaataatgtcctggcaacaataggagaattggcacaggttagtggcctggaaatgaggaaatgggttgatgaactttttattatcatcatggacatgctccaggattcctctttgttggccaaaaggcaggtggctctgtggaccctgggacagttggtggccagcactggctatgtagtagagccctacaggaagtaccctactttgcttgaggtgctactgaattttctgaagactgagcagaaccagggtacacgcagagaggccatccgtgtgttagggcttttaggggctttggatccttacaagcacaaagtgaacattggcatgatagaccagtcccgggatgcctctgctgtcagcctgtcagaatccaagtcaagtcaggattcctctgactatagcactagtgaaatgctggtcaacatgggaaacttgcctctggatgagttctacccagctgtgtccatggtggccctgatgcggatcttccgagaccagtcactctctcatcatcacaccatggttgtccaggccatcaccttcatcttcaagtccctgggactcaaatgtgtgcagttcctgccccaggtcatgcccacgttccttaacgtcattcgagtctgtgatggggccatccgggaatttttgttccagcagctgggaatgttggtgtcctttgtgaagagccacatcagaccttatatggatgaaatagtcaccctcatgagagaattctgggtcatgaacacctcaattcagagcacgatcattcttctcattgagcaaattgtggtagctcttgggggtgaatttaagctctacctgccccagctgatcccacacatgctgcgtgtcttcatgcatgacaacagcccaggccgcattgtctctatcaagttactggctgcaatccagctgtttggcgccaacctggatgactacctgcatttactgctgcctcctattgttaagttgtttgatgcccctgaagctccactgccatctcgaaaggcagcgctagagactgtggaccgcctgacggagtccctggatttcactgactatgcctcccggatcattcaccctattgttcgaacactggaccagagcccagaactgcgctccacagccatggacacgctgtcttcacttgtttttcagctggggaagaagtaccaaattttcattccaatggtgaataaagttctggtgcgacaccgaatcaatcatcagcgctatgatgtgctcatctgcagaattgtcaagggatacacacttgctgatgaagaggaggatcctttgatttaccagcatcggatgcttaggagtggccaaggggatgcattggctagtggaccagtggaaacaggacccatgaagaaactgcacgtcagcaccatcaacctccaaaaggcctggggcgctgccaggagggtctccaaagatgactggctggaatggctgagacggctgagcctggagctgctgaaggactcatcatcgccctccctgcgctcctgctgggccctggcacaggcctacaacccgatggccagggatctcttcaatgctgcatttgtgtcctgctggtctgaactgaatgaagatcaacaggatgagctcatcagaagcatcgagttggccctcacctcacaagacatcgctgaagtcacacagaccctcttaaacttggctgaattcatggaacacagtgacaagggccccctgccactgagagatgacaatggcattgttctgctgggtgagagagctgccaagtgccgagcatatgccaaagcactacactacaaagaactggagttccagaaaggccccacccctgccattctagaatctctcatcagcattaataataagctacagcagccggaggcagcggccggagtgttagaatatgccatgaaacactttggagagctggagatccaggctacctggtatgagaaactgcacgagtgggaggatgcccttgtggcctatgacaagaaaatggacaccaacaaggacgacccagagctgatgctgggccgcatgcgctgcctcgaggccttgggggaatggggtcaactccaccagcagtgctgtgaaaagtggaccctggttaatgatgagacccaagccaagatggcccggatggctgctgcagctgcatggggtttaggtcagtgggacagcatggaagaatacacctgtatgatccctcgggacacccatgatggggcattttatagagctgtgctggcactgcatcaggacctcttctccttggcacaacagtgcattgacaaggccagggacctgctggatgctgaattaactgcgatggcaggagagagttacagtcgggcatatggggccatggtttcttgccacatgctgtccgagctggaggaggttatccagtacaaacttgtccccgagcgacgagagatcatccgccagatctggtgggagagactgcagggctgccagcgtatcgtagaggactggcagaaaatccttatggtgcggtcccttgtggtcagccctcatgaagacatgagaacctggctcaagtatgcaagcctgtgcggcaagagtggcaggctggctcttgctcataaaactttagtgttgctcctgggagttgatccgtctcggcaacttgaccatcctctgccaacagttcaccctcaggtgacctatgcctacatgaaaaacatgtggaagagtgcccgcaagatcgatgccttccagcacatgcagcattttgtccagaccatgcagcaacaggcccagcatgccatcgctactgaggaccagcagcataagcaggaactgcacaagctcatggcccgatgcttcctgaaacttggagagtggcagctgaatctacagggcatcaatgagagcacaatccccaaagtgctgcagtactacagcgccgccacagagcacgaccgcagctggtacaaggcctggcatgcgtgggcagtgatgaacttcgaagctgtgctacactacaaacatcagaaccaagcccgcgatgagaagaagaaactgcgtcatgccagcggggccaacatcaccaacgccaccactgccgccaccacggccgccactgccaccaccactgccagcaccgagggcagcaacagtgagagcgaggccgagagcaccgagaacagccccaccccatcgccgctgcagaagaaggtcactgaggatctgtccaaaaccctcctgatgtacacggtgcctgccgtccagggcttcttccgttccatctccttgtcacgaggcaacaacctccaggatacactcagagttctcaccttatggtttgattatggtcactggccagatgtcaatgaggccttagtggagggggtgaaagccatccagattgatacctggctacaggttatacctcagctcattgcaagaattgatacgcccagacccttggtgggacgtctcattcaccagcttctcacagacattggtcggtaccacccccaggccctcatctacccactgacagtggcttctaagtctaccacgacagcccggcacaatgcagccaacaagattctgaagaacatgtgtgagcacagcaacaccctggtccagcaggccatgatggtgagcgaggagctgatccgagtggccatcctctggcatgagatgtggcatgaaggcctggaagaggcatctcgtttgtactttggggaaaggaacgtgaaaggcatgtttgaggtgctggagcccttgcatgctatgatggaacggggcccccagactctgaaggaaacatcctttaatcaggcctatggtcgagatttaatggaggcccaagagtggtgcaggaagtacatgaaatcagggaatgtcaaggacctcacccaagcctgggacctctattatcatgtgttccgacgaatctcaaagcagctgcctcagctcacatccttagagctgcaatatgtttccccaaaacttctgatgtgccgggaccttgaattggctgtgccaggaacatatgaccccaaccagccaatcattcgcattcagtccatagcaccgtctttgcaagtcatcacatccaagcagaggccccggaaattgacacttatgggcagcaacggacatgagtttgttttccttctaaaaggccatgaagatctgcgccaggatgagcgtgtgatgcagctcttcggcctggttaacacccttctggccaatgacccaacatctcttcggaaaaacctcagcatccagagatacgctgtcatccctttatcgaccaactcgggcctcattggctgggttccccactgtgacacactgcacgccctcatccgggactacagggagaagaagaagatccttctcaacatcgagcatcgcatcatgttgcggatggctccggactatgaccacttgactctgatgcagaaggtggaggtgtttgagcatgccgtcaataatacagctggggacgacctggccaagctgctgtggctgaaaagccccagctccgaggtgtggtttgaccgaagaaccaattatacccgttctttagcggtcatgtcaatggttgggtatattttaggcctgggagatagacacccatccaacctgatgctggaccgtctgagtgggaagatcctgcacattgactttggggactgctttgaggttgctatgacccgagagaagtttccagagaagattccatttagactaacaagaatgttgaccaatgctatggaggttacaggcctggatggcaactacagaatcacatgccacacagtgatggaggtgctgcgagagcacaaggacagtgtcatggccgtgctggaagcctttgtctatgaccccttgctgaactggaggctgatggacacaaataccaaaggcaacaagcgatcccgaacgaggacggattcctactctgctggccagtcagtcgaaattttggacggtgtggaacttggagagccagcccataagaaaacggggaccacagtgccagaatctattcattctttcattggagacggtttggtgaaaccagaggccctaaataagaaagctatccagattattaacagggttcgagataagctcactggtcgggacttctctcatgatgacactttggatgttccaacgcaagttgagctgctcatcaaacaagcgacatcccatgaaaacctctgccagtgctatattggctggtgccctttctggtaactggaggcccagatgtgcccatcacgttttttctgaggcttttgtactttagtaaatgcttccactaaactgaaaccatggtgagaaagtttgactttgttaaatattttgaaatgtaaatgaaaagaactactgtatattaaaagttggtttgaaccaactttctagctgctgttgaagaatatattgtcagaaacacaaggcttgatttggttcccaggacagtgaaacaatagtaataccacgtaaatcaagccattcattttggggaacagaagatccataactttagaaatacgggttttgacttaactcacaagagaactcatcataagtacttgctgatggaagaatgacctagttgctcctctcaacatgggtacagcaaactcagcacagccaagaagcctcaggtcgtggagaacatggattaggatcctagactgtaaagacacagaagatgctgacctcacccctgccacctatcccaagacctcactggtctgtggacagcagcagaaatgtttgcaagataggccaaaatgagtacaaaaggtctgtcttccatcagacccagtgatgctgcgactcacacgcttcaattcaagacctgaccgctagtagggaggtttattcagatcgctggcagcctcggctgagcagatgcacagaggggatcactgtgcagtgggaccaccctcactggccttctgcagcagggttctgggatgttttcagtggtcaaaatactctgtttagagcaagggctcagaaaacagaaatactgtcatggaggtgctgaacacagggaaggtctggtacatattggaaattatgagcagaacaaatactcaactaaatgcacaaagtataaagtgtagccatgtctagacaccatgttgtatcagaataatttttgtgccaataaatgacatcagaattttaaacata

SEQ ID NO: 1492 - DNA, 407 bp, Artificial Sequence
  Description of Artificial sequences:primer
  misc_feature (1)..(407): 3' terminal sequence from clone image:713459. hypothetical protein mgc27165(MGC27165) gene.
gttttttttttgcttgggggagcatggagtttattcaggggtggggacaggcgggcggctcagtagcaggtgccgtccacctccgccatgacaacagacacattgacatgggtgggtttaccgccaagcggtcgatggtcttctgtgtgaaggccagcgcgagggcctcgtggccagccatgcaggagaaggtgtcccccttcttccagtcctcggctgccacgcgcagtatgctggtcacagcgaaggtggtggtgccctggctgggctcctgcccgggatgcccaagtcaggtacttctcgcggggcagctccttgtgacccctgcagcccaacgaactcagcacgttctttgggggctgaagcggcgttgccaggcagttcaggcgtcaccagcttgttcaggg

SEQ ID NO: 1493 - DNA, 450 bp, Artificial Sequence
  Description of Artificial sequences:primer
  misc_feature (1)..(450): 5' terminal sequence from clone image:713459. hypothetical protein mgc27165(MGC27165) gene.
acacagtgcctagccggcaagtccgtgacatgccacgtgaagcactacacgaatcccagccaggatgtgactgtgccctgcccagttccctcaactccacctaccccatctccctcaactccacctaccccatctccctcatgctgccacccccgactgtcactgcaccgaccggccctcgaggacctgctcttaggttcagaagcgaacctcacgtgcacactgaccggcctgagagatgcctcaggtgtcaccttcacctggacgccctcaagtgggaagagcgctgttcaaggaccacctgagcgtgacctctgtggctgctacagcgtgtccagtgtcctgccgggctgtgcgagccatggaaccatgggaagaccttcacttgcactgctgcctaccccgagtccaagaccccgctaaccgccaccctctcaaaatccggaaaca

SEQ ID NO: 1494 - DNA, 218 bp, Artificial Sequence
  Description of Artificial sequences:primer
  misc_feature (1)..(218): 3' terminal sequence from clone image:72056. ribosomal protein s27 (metallopanstimulin 1)(RPS27) gene.
  misc_feature (37)..(37): n is a, c, g, or t
  misc_feature (94)..(94): n is a, c, g, or t
  misc_feature (97)..(97): n is a, c, g, or t
  misc_feature (107)..(107): n is a, c, g, or t
  misc_feature (131)..(131): n is a, c, g, or t
  misc_feature (180)..(180): n is a, c, g, or t
  misc_feature (205)..(205): n is a, c, g, or t
tttttttttatttttttttttttttatccaaaatgtntttattgagatggtttcccactcatcttgactcagagtgcttttagtgctgcttccnccngaaggaacanccttctgtaagccttgcttttccncctgtaggctggcagaggacagtggagcagccaacacacaaaactaccntttgtgcatggctaaagaccgtggngattttctcgtgc

SEQ ID NO: 1495 - DNA, 187 bp, Artificial Sequence
  Description of Artificial sequences:primer
  misc_feature (1)..(187): 5' terminal sequence from clone image:72056. ribosomal protein s27 (metallopanstimulin 1)(RPS27) gene.
aaatcaccacggtctttagccatgcacaaacggtagttttgtgtgttggctgctccactgtcctctgccagcctacaggaggaaaagcaaggcttacagaaggatgttccttcaggaggaagcagcactaaaagcactctgagtcaagatgagtgggaaaccatctcaataaacacattttgggata

SEQ ID NO: 1496 - DNA, 344 bp, Artificial Sequence
  Description of Artificial sequences:primer
  misc_feature (1)..(344): ribosomal protein s27 (metallopanstimulin 1)(RPS27) gene.
cctttccggcggtgacgacctacgcacacgagaacatgcctctcgcaaaggatctccttcatccctctccagaagaggagaagaggaaacacaagaagaaacgcctggtgcagagccccaattcctacttcatggatgtgaaatgcccaggatgctataaaatcaccacggtctttagccatgcacaaacggtagttttgtgtgttggctgctccactgtcctctgccagcctacaggaggaaaagcaaggcttacagaaggatgttccttcaggaggaagcagcactaaaagcactctgagtcaagatgagtgggaaaccatctcaataaacacattttggat

SEQ ID NO: 1497 - DNA, 355 bp, Artificial Sequence
  Description of Artificial sequences:primer
  misc_feature (1)..(355): 3' terminal sequence from clone image:723731. v-rel reticuloendotheliosis viral oncogene homolog a, nuclear factor of kappa light polypeptide gene enhancer in b-cells 3, p65 (avian)(RELA) gene.
cagcttggcaacagatttattagttcagagtagaaagagcaagagtccaagtgctttgattgttcagtaaaaactatgcctcctgactggagagctgccagcctgctctcccccactcttaacaacttaccctactattaaggcacttgagaagagggagagcaaggaagtcccagaccaaaccccttctggatcctggagagagccagtgctgttgcactggtttccttcagccatggttgagcaaggaaagagccggcagagacctctgtagggcaggaaggccagcccctcaaacgctggtgttaggcacagggacaatgccagtgccatacaggggctggtatctggggcg

SEQ ID NO: 1498 - DNA, 2444 bp, Artificial Sequence
  Description of Artificial sequences:primer
  misc_feature (1)..(2444): v-rel reticuloendotheliosis viral oncogene homolog a, nuclear factor of kappa light polypeptide gene enhancer in b-cells 3, p65 (avian)(RELA) gene.
ggcacgaggcggggccgggtcgcagctgggcccgcggcatggacgaactgttccccctcatcttcccggcagagcagcccaagcagcggggcatgcgcttccgctacaagtgcgaggggcgctccgcgggcagcatcccaggcgagaggagcacagataccaccaagacccaccccaccatcaagatcaatggctacacaggaccagggacagtgcgcatctccctggtcaccaaggaccctcctcaccggcctcacccccacgagcttgtaggaaaggactgccgggatggcttctatgaggctgagctctgcccggaccgctgcatccacagtttccagaacctgggaatccagtgtgtgaagaagcgggacctggagcaggctatcagtcagcgcatccagaccaacaacaaccccttccaagttcctatagaagagcagcgtggggactacgacctgaatgctgtgcggctctgcttccaggtgacagtgcgggacccatcaggcaggcccctccgcctgccgcctgtcctttctcatcccatctttgacaatcgtgcccccaacactgccgagctcaagatctgccgagtgaaccgaaactctggcagctgcctcggtggggatgagatcttcctactgtgtgacaaggtgcagaaagaggacattgaggtgtatttcacgggaccaggctgggaggcccgaggctccttttcgcaagctgatgtgcaccgacaagtggccattgtgttccggacccctccctacgcagaccccagcctgcaggctcctgtgcgtgtctccatgcagctgcggcggccttccgaccgggagctcagtgagcccatggaattccagtacctgccagatacagacgatcgtcaccggattgaggagaaacgtaaaaggacatatgagaccttcaagagcatcatgaagaagagtcctttcagcggacccaccgacccccggcctccacctcgacgcattgctgtgccttcccgcagctcagcttctgtccccaagccagcaccccagccctatccctttacgtcatccctgagcaccatcaactatgatgagtttcccaccatggtgtttccttctgggcagatcagccaggcctcggccttggccccggcccctccccaagtcctgccccaggctccagcccctgcccctgctccagccatggtatcagctctggcccaggccccagcccctgtcccagtcctagccccaggccctcctcaggctgtggccccacctgcccccaagcccacccaggctggggaaggaacgctgtcagaggccctgctgcagctgcagtttgatgatgaagacctgggggccttgcttggcaacagcacagacccagctgtgttcacagacctggcatccgtcgacaactccgagtttcagcagctgctgaaccagggcatacctgtggccccccacacaactgagcccatgctgatggagtaccctgaggctataactcgcctagtgacagcccagaggccccccgacccagctcctgctccactgggggccccggggctccccaatggcctcctttcaggagatgaagacttctcctccattgcggacatggacttctcagccctgctgagtcagatcagctcctaagggggtgacgcctgccctccccagagcactggttgcaggggattgaagccctccaaaagcacttacggattctggtggggtgtgttccaactgcccccaactttgtggatgtcttccttggaggggggagccatattttattcttttattgtcagtatctgtatctctctctctttttggaggtgcttaagcagaagcattaacttctctggaaaggggggagctggggaaactcaaacttttcccctgtcctgatggtcagctcccttctctgtagggaactgtggggtcccccatccccatcctccagcttctggtactctcctagagacagaagcaggctggaggtaaggcctttgagcccacaaagccttatcaagtgtcttccatcatggattcattacagcttaatcaaaataacgccccagataccagcccctgtatggcactggcattgtccctgtgcctaacaccagcgtttgaggggctgccttcctgccctacagaggtctctgccggctctttccttgctcaaccatggctgaaggaaacagtgcaacagcactggctctctccaggatccagaaggggtttggtctggacttccttgctctcccctcttctcaagtgccttaatagtagggtaagttgttaagagtgggggagagcaggctggcagctctccagtcaggaggcatagtttttagtgaacaatcaaagcacttggactcttgctctttctactctgaactaataaagctgttgccaagctggacggcacgagctcgtgcc

SEQ ID NO: 1499 - DNA, 288 bp, Artificial Sequence
  Description of Artificial sequences:primer
  misc_feature (1)..(288): 3' terminal sequence from clone image:72497. ryanodine receptor 3(RYR3) gene.
  misc_feature (113)..(113): n is a, c, g, or t
  misc_feature (128)..(129): n is a, c, g, or t
  misc_feature (133)..(133): n is a, c, g, or t
  misc_feature (153)..(153): n is a, c, g, or t
  misc_feature (158)..(158): n is a, c, g, or t
  misc_feature (182)..(182): n is a, c, g, or t
  misc_feature (191)..(191): n is a, c, g, or t
  misc_feature (199)..(199): n is a, c, g, or t
  misc_feature (214)..(214): n is a, c, g, or t
  misc_feature (282)..(282): n is a, c, g, or t
ttattggtacgtattactttattgcagtgggcacttcattgtatttgaggagattcacctaaacagagcagctccactacttacaagggaccataaggcattactccattttngcataaggttgaganntttnttctgaattttcagtacagnacttntcttctaataacagcagttgactnacagctgtnactaaaanaacttgtatgaatanccttcaagtgcagtttcataaagtaagacggaagatcacaactaatgaatggagctgtccttctggancacaaa

SEQ ID NO: 1500 - DNA, 15564 bp, Artificial Sequence
  Description of Artificial sequences:primer
  misc_feature (1)..(15564): ryanodine receptor 3(RYR3) gene.
cgcacgccgagcggctgccgggggaagcagaggcgccggaggctggggcaccgccgacgcctcgggagccatggccgaagggggagaaggaggcgaggacgagatccagtttctgaggactgaggatgaagtggtactccagtgcatcgccaccattcataaggagcagaggaagttctgcctggcagccgagggacttgggaatcgcctgtgcttcttggaacccacttcagaagccaagtacattcctccagatctctgcgtctgcaattttgtgctggaacagtccctatctgtcagagccctgcaggaaatgcttgccaacacaggtgaaaatggcggcgaaggggcagcacaaggaggtggccacaggaccctgttatacggccatgcagttctcctgaggcactctttcagcggaatgtatctaacatgcttgactacatcaagatcccagacagacaaacttgcctttgatgtaggtctacgggaacatgccacaggagaagcctgttggtggactatacatcctgcttccaaacagaggtccgaaggagagaaagttcgaattggcgatgacctcatcctcgtcagcgtgtcctctgaaagataccttcatctctcagtatcaaatggtaacatacaagtggatgcctcctttatgcaaacactctggaatgtacatcctacgtgctcaggaagtagcatcgaagaaggatacctacttggtgggcatgtagtacgtcttttccatggtcatgatgaatgtttgacgataccatctacagaccagaatgattcccagcacaggaggatattctacgaagctgggggagctgggactcgagccagttctctttggagagtggaaccccttcggataagctggagtggcagtaacatcagatggggccaggctttccgactccggcatctcaccacaggccactacctggccttgacagaagaccaaggccttatactgcaagaccgggcaaagtcagacaccaagtccacagctttctctttccgggcatcaaaggaactcaaggagaaattagactccagtcacaagcgagacatagaaggcatgggagttccagaaatcaagtatggagattctgtctgctttgtgcagcatatagccagtggtctgtgggtgacctacaaagcacaagacgccaaaacttcccgcctgggacctctaaaaagaaaggtcatactccatcaggaaggccacatggatgatggattaacactgcagagatgccagcgtgaggagtcccaggctgctcggatcatccggaacactacagccttattcagccagtttgtcagtggaaacaatcgcacagctgcccccatcaccctgcctatagaagaagtcctgcagaccctacaggacttgatcgcctacttccagcccccagaggaggagatgcgacatgaagacaagcagaacaagctccgctcactcaaaaacagacaaaatcttttcaaggaagagggaatgttggcccttgtcttaaattgcattgaccgcttaaatatctacaatagcgtagcacactttgcagggattgcaagggaagagagtggcatggcctggaaagaaattctgaacctcctctacaaattgctggctgctctcattcgcggaaacagaaacaattgcgctcaattctccaataaccttgattggctcatcagtaaattggacagactagaatcttcctcaggtatcttggaagttttgcactgcatcttaactgaaagcccagaagccttaaatctgatagcggagggccacatcaagtcgatcatctccctgttggataagcacgggcggaatcacaaggttctggatatcctgtgctccctctgtctctgcaatggggttgcagtgagagccaaccagaatctgatctgtgacaacttgctgccccggagaaacctactcctgcagacacgactgattaacgatgtaaccagtatccggccaaacatcttcctgggagtcgcggagggctcagcccagtacaagaagtggtacttcgagctgattatcgaccaggtggaccccttcctaacagcagagcccacacatctgcgggtgggctgggcctcttcttcaggctatgccccatgcccaggaggtggagaaggatggggaggcaatggtgttggtgacgacctgtactcctatggctttgatggacttcacctttggtcaggccggatacccagagctgtggcttccgtcaaccagcacctcctgagatcggatgacgtggtaagctgctgcctggacctcggggtgcccagcatctcattccgcatcaatgggcagcccgtgcaggggatgtttgagaacttcaacacagacgggctcttcttccctgtgatgagcttttcagcaggtgtcaaagtacgtttcctgatgggtggacgtcatggagagtttaagttcctgcctccctctggctatgccccttgctatgaagccttacttccaaaagagaagatgagattggagcctgtcaaagaatataaacgtgatgctgatggcattagagatctcttgggtaccacccagttcctctcccaagcctctttcatcccatgccccgtagacaccagtcaggttattttgccacctcacctagaaaagatccgagacagactagctgaaaacatccatgagctttggggaatgaataaaatagaacttggctggactttcggcaagatacgagatgacaataaaagacaacacccttgccttgtggagttttcaaagctcccagaaactgagaagaactataacctgcaaatgtcaactgaaaccttaaaaaccctcttggccctggggtgccacattgctcatgttaacccagctgctgaggaggatctcaagaaggtcaaactgcccaaaaactatatgatgtccaacggctataagccagcccctttggatttgtctgatgtgaagctgttacctcctcaagaaattttagtggataagcttgcagaaaatgcacacaatgtttgggcaaaagacagaataaaacaaggatggacctatggcatccaacaggatttgaagaacaaaagaaatccccgtctggtgccatatgcattactggatgagcgtaccaagaagtcaaacagggacagcctgcgggaagctgtgcgcacttttgttggttacgggtataacattgagccatcagaccaagaactagctgactcggctgtggagaaggtcagcatagacaagatccgatttttccgggtagagcgatcttatgcagtgagatctggaaagtggtattttgagtttgaagtggtgactggaggagacatgcgagtcggctgggcgaggccaggctgtcgacctgatgtcgagctgggggccgatgaccaagcctttgtgtttgaaggcaacaggggccagcgttggcatcaaggaagtgggtattttgggcgtacctggcagccaggggatgtggtcggatgtatgattaacctggatgatgcttcaatgatcttcacactgaatggggagctgctgatcaccaacaaaggctctgaacttgccttcgctgactacgagattgagaatggcttcgtgcccatctgctgtctgggtctatctcagatcggccgcatgaatctcgggacagatgccagtaccttcaagttttataccatgtgcggtctccaagagggctttgagccttttgctgtcaacatgaacagagatgttgctatgtggttcagcaagcgcctcccgacgtttgtcaacgtgccaaaggatcatccacacatagaggtcatgaggattgatggcaccatggacagccctccgtgtctcaaggtgacgcataagacatttggcacacagaatagcaatgccgacatgatctattgccgcttgagcatgcctgtcgagtgccactcctccttcagccacagcccctgtctggacagtgaagctttccagaaaaggaaacagatgcaagaaatactctctcatacaacaacacagtgctactacgccatccgcatctttgctggacaggatccatcctgtgtctgggtcggatgggtgactccagactatcacttgtacagtgaaaagtttgacctgaataaaaactgcacagtgactgtcaccctaggggatgaaagaggccgggtccatgaaagtgtgaaacgcagcaactgctacatggtctggggtggagacattgtagccagttcccagagatcaaatcggagcaacgtggacctggagatcggctgtctcgtggatctggccatgggcatgttgtccttctcagccaatggaaaggaactgggcacctgctaccaggtggagcctaataccaaagtgtttccagcagtcttcctgcagcctacaagtacttctttgtttcagtttgaacttggaaagctgaagaacgcaatgcccctgtcagcggccatattcaggagtgaagagaagaacccagtcccacagtgtccacctcggctggacgtccaaaccatccagcccgtgctctggagccgcatgcccaacagcttcctgaaggtggagaccgagcgtgtgagcgagcgccacggctgggtggtgcagtgcctggagcccctgcagatgatggcgctccacatccccgaggagaacaggtgtgtggatatcctggagctctgtgagcaggaggacctgatgcggttccattaccacacgctgaggctctacagcgcggtgtgcgccctgggaaacagccgcgtggcctacgccctgtgcagccacgtggacctctcccagctcttctatgccattgacaacaagtacctccccggcctccttcgatctggtttctatgacctgctcatcagcatccacctggccagcgccaaggagaggaagctgatgatgaagaacgagtacatcatccccattaccagcaccaccaggaatatctgcctcttcccggacgagtccaagaggcatggactgcctggggtgggcctgagaacatgtctcaagcccgggttcaggttctccaccccttgctttgttgtgactggtgaggatcaccaaaagcagagccccgagattcccttggagagtctcaggacgaaggctctgagtatgctgacagaggcagtgcagtgcagcggggcccacatccgagaccctgtaggggggtctgtggagttccagtttgtgcctgtgctgaaactcattggaaccctgctggtcatgggcgtgtttgatgatgatgatgttcggcagatcctcctcctgattgatccctctgtgtttggggagcatagtgcggggacagaggagggagcagaaaaggaggaagtgacccaggtggaggagaaggctgtggaggctggggagaaggccggcaaggaggctcctgtcaaaggcttgttgcagactcgattacccgaatccgtcaagctgcagatgtgtgagctcctcagctatctctgcgactgtgagctgcagcaccgagtggaggccattgtggcatttggtgacatttatgtctccaagctgcaggcaaatcagaagttccgctacaatgagctcatgcaggccctgaacatgtctgcggccctgactgcccggaagaccaaggagttccgctcacccccacaggagcagatcaacatgctgcttaactttcaactgggagagaactgcccctgcccagaggagattcgggaggagctgtatgatttccatgaggaccttctccttcactgtggggttcctttggaagaagaggaagaggaggaggaggacacctcctggacaggaaaactctgtgccttggtttacaaaatcaaaggcccacccaagccagagaaggagcagccgacggaggaggaggagagatgccccacaacattgaaggaactcatctcacagacgatgatctgctgggcccaggaggaccagatccaggattcagagctggtccgaatgatgttcaacctcctccggaggcagtatgacagcattggggagctgctgcaggcgctgcggaagacctacaccatcagccacacctctgtaagcgacaccatcaacctgctggctgccctgggccaaatccgctccctcctcagtgtcaggatgggcaaggaagaggagttgctcatgatcaatgggctgggagacataatgaacaacaaggtgttttaccagcatcccaacctcatgagagtcctgggcatgcacgagacggtgatggaggtgatggtgaacgtgttgggtacagagaaatctcagattgcatttccaaagatggttgctagctgctgccgtttcctttgctatttctgtcgaattagccggcaaaatcagaaggccatgtttgagcatctgagttatcttctggagaatagcagtgttggcctagcctccccgtcgatgaggggatccaccccgctggatgtggcagcttcctctgtgatggacaacaatgagttagcgctgagcttagaggaaccagacctcgagaaggtggtgacctacttggcaggctgtggcctacagagctgccccatgcttctggccaaaggataccctgatgtcggctggaaccccattgaaggggaacgctacctgtccttcctgaggtttgctgtcttcgtgaacagtgagagtgtggaagaaaacgccagcgttgtggtcaagctgctcatcagacgcccagagtgcttcggcccggccctgcggggtgaggggggaaacgggctcttggcagccatgcagggtgccattaagatctctgagaacccagcgctcgacctcccctctcaaggatacaaaagagaagtcagcacggaggacgatgaagaggaagaagaaatcgtgcatatgggcaatgcaattatgtcattttattcggcccttatagatctactgggccgctgtgctcctgaaatgcacctcatccagacaggaaagggggaagccatccgcatcaggtccatcctgcgctccctggtccccacagaagacctggttgggatcatcagcatccccttgaaactgccctccctcaacaaagatgggtcggtcagtgagccagatatggcggccaatttctgccctgaccacaaggcacctatggtgctgttcttggaccgcgtttatggcattaaggatcaaacttttctgctccacttactggaggttggatttttacctgacctaagagcttctgcctctctagatacagtttccctaagcaccacagaggctgcgcttgcactaaataggtatatatgttctgctgtgctcccgctcctcacaagatgtgcccctctctttgccggaacagaacactgcacctctctgattgattccacactgcagacaatatacaggctatccaagggacgttccctcaccaaagcacaaagggacactatagaagaatgtttgcttgccatttgcaatcacttgaggccttccatgttacagcaactcctgcgacgcctcgtttttgatgtgccgcaactcaatgaatactgcaaaatgcctctcaagcttctgacgaatcactatgaacagtgttggaagtattactgcctgccttcaggatgggggagctacgggctagctgtggaagaagagctgcacctaacggagaagcttttctgggggatttttgactcgctctcccataagaaatatgacccagatcttttccgaatggccctgccttgtctcagtgctatagctggggccttgccaccagattatttagataccagaatcacagccacattggagaaacagatctcagtggatgcggatggcaactttgacccaaaacctattaacaccatgaatttttccttgcctgaaaaattggaatacatcgtcaccaagtatgctgagcattcacatgataaatgggcctgtgacaagagtcagagtggatggaaatatgggatttccctggatgaaaatgtgaagacccacccactgataaggcctttcaagacattaacggagaaggagaaggaaatttatcgctggcctgcgcgagagtccctgaaaaccatgctggctgtgggctggactgtggagaggaccaaagagggagaagctttggttcaacagcgggaaaatgagaagcttcgaagtgtgtcccaggccaaccagggcaacagctacagtcctgctcccctcgacctctcaaacgttgtgctctccagagagctccagggaatggtggaggtcgtggctgagaactatcacaatatctgggccaagaagaagaagctggagctggagagcaaaggtggtggcagccaccctcttctggtaccatatgacaccttgactgccaaggaaaagttcaaggaccgggagaaggcacaggacctgtttaagttcctccaagtgaatggcatcatagtttccaggggtatgaaggatatggagctggatgcctcctccatggagaagaggtttgcctataagttcttgaagaagatcctgaaatacgttgattctgctcaagaatttattgcccatttagaagccattgtcagcagtgggaaaactgaaaagtctccccgtgaccaggagatcaaattctttgccaaagttctcctcccgctggttgaccagtacttcaccagtcattgcctctacttcttgtcatcccctctgaagccccttagcagcagcggatatgcctcccataaggagaaagaaatggtggccggcctgttctgcaaacttgccgctctcgttagacacagaatttccctctttggtagtgattctactacaatggtgagctgtcttcacatcttagctcagacacttgacacaaggactgtcatgaagtcaggctcagagctggtgaaggctgggttacgagcattctttgaaaatgctgcagaagatttggagaagacttcagaaaacctgaaacttgggaagttcacccattcccgaacgcagattaaaggcgtttctcagaatattaactacactacagtggctctgctccccatcctgacgtccatctttgagcacgtcactcagcatcagtttggaatggatctactcttgggtgatgtgcagatttcatgctaccacatactgtgcagcctctactcccttgggacgggaaagaacatttatgttgaaaggcaacgccctgcccttggagaatgtctggcctcgctggcagctgccataccagtggcattcctggagcccacccttaatcgctacaatccactctcggtcttcaacaccaaaacccccagggagaggtctattctggggatgccagacacggtagaagacatgtgtcctgacatcccccagctggaaggcctgatgaaggaaatcaacgacctggccgagtcaggggcccggtacacagagatgccccatgtcatcgaggtgatcttacccatgctctgcaactacttgtcctactggtgggagcggggtcctgagaacctgccccccagcacagggccatgctgcaccaaggtcacctctgaacacctcagtctcatcctgggcaacattctgaaaatcatcaacaacaacctgggcatcgatgaggcctcctggatgaagcgcattgcagtgtatgcacagcccatcatcagcaaagccaggcccgacctgctgagaagccacttcatcccaactctggagaagctgaagaaaaaggctgtcaagacggtgcaggaggaggagcagttgaaagccgatggcaaaggggacacccaggaggcagaactcctcatcctggacgagttcgcggtcctctgcagagatctctatgccttctaccccatgctgatccgctacgtggacaacaacagatctaactggctgaaaagtcctgatgctgattctgaccagctcttccgcatggtggcagaagtcttcattctgtggtgtaaatctcataacttcaagagagaagagcaaaattttgtgattcagaatgaaattaataatttggcatttttaactggagacagcaaaagcaagatgtcaaaagccatgcaagtaaagtctggaggacaagaccaggagcggaagaagacaaagcggcggggagacttgtattccatccagacctccctcatcgtggctgcactcaagaaaatgctgcccattggtttgaatatgtgtactccaggcgaccaggagctgatctccctcgcaaaatcgcgatacagccatagggacacagatgaagaggtcagagaacatctgcggaacaacttgcacttgcaggaaaagtctgatgacccagctgtaaaatggcaactgaacctctacaaggatgttctgaagagtgaagaacctttcaatccggaaaagacagtggagcgtgtgcagagaatttcagcagctgtcttccacctggaacaggtggaacagcctttgaggtccaagaaggccgtctggcacaaactgttatcaaagcaacggaaacgggcagtggtggcctgtttcaggatggcccctctctacaacctgcccaggcaccgctctattaacctcttcctccatggctatcagagattttggatagaaacagaggagtattcctttgaagagaaactagtacaggatttggctaaatctccaaaggtggaagaggaggaggaggaagagacagaaaaacaacctgacccactacatcagatcattctctattttagccgcaacgctctcacggagaggagcaaattggaagacgaccctttgtacacctcctattccagcatgatggccaagagttgtcaaagtggtgaggatgaagaagaagatgaagacaaggaaaaaacattcgaagagaaagagatggagaagcaaaaaaccctctatcagcaagctcggctgcatgagcgtggtgctgcggagatggtccttcagatgataagcgctagcaaaggtgagatgagccccatggtggttgagacgctgaagctggggatcgccattctgaacggaggcaatgctggtgtgcaacagaaaatgctagattacctaaaggagaaaaaggatgctggattctttcaaagcctttctggtcttatgcagtcttgcagtgtccttgatttgaatgcatttgagaggcagaataaagctgaaggcctggggatggtgactgaagaaggaacactcattgttcgggaacgtggtgaaaaagtactccagaatgacgagttcacgcgtgatctctttagattcctacagttactttgtgagggacataacagtgactttcagaacttcctgcggactcagatgggcaacaccaccaccgtgaatgtcatcatcagcactgtggactaccttctgcgtctgcaggaatcaatcagtgatttctactggtattattcagggaaggacatcattgatgaatctggacagcacaatttttccaaagctctggcagtcaccaagcagattttcaattctcttacagaatacatccagggcccttgcattggtaatcaacagagcctggctcacagcaggctgtgggacgcagtggttggcttcctccatgtctttgctaatatgcagatgaaactctctcaggattccagtcagatcgagctgctgaaggaactcttggatctccttcaggacatggtggtgatgcttctgtccctcctggaagggaatgtggtaaatggcaccattggcaagcagatggttgacacactggtagaatcatctaccaatgtagaaatgatcttgaaattctttgacatgttcttgaaacttaaagacttaaccagctcagacaccttcaaagaatatgacccagatggtaaaggaattatctccaaaaaagaattccagaaggccatggaagggcaaaaacagtacacgcagtcagagattgactttctcctgtcgtgtgcagaagctgatgagaatgacatgtttaattacgttgattttgtagaccggttccatgagccagccaaggacatagggtttaatgtggctgtgttattgacaaatctttctgaacacatgccaaacgattcccgcctgaagtgtctgttggacccagcagaaagtgtgctaaattacttcgaaccctacctaggacgcatcgagatcatgggtggggccaagaagattgagcgtgtttattttgagatcagtgaatccagtcgcactcagtgggagaagccccaggtgaaggaatctaagcgacagttcatttttgatgttgtcaatgaaggtggggagcaggaaaagatggagctgtttgtgaacttctgtgaggacaccatctttgaaatgcagttagcatctcagatctctgaatccgattcagctgacaggccagaagaggaggaagaagatgaagattcttcttacgtgttagaaattgcgggtgaagaggaagaagacgggtctcttgagccggcctctgcatttgctatggcctgtgcctctgtgaagaggaatgtcaccgacttcctgaagagagcaaccctgaagaacctcaggaagcagtacaggaacgtgaaaaagatgactgcgaaggagctggtgaaggtgctcttctcctttttctggatgctgttcgtggggctattccagttgctcttcaccatcctgggaggaatctttcagatcctctggagcacagtgtttggagggggcctggtagaaggggcaaagaacatcagagtgaccaagatcctgggtgacatgcctgacccaacccaatttggtatccatgatgacactatggaggctgagagggcagaggtgatggagccaggtatcaccactgaactagtacacttcataaagggggagaagggagatacagatatcatgtcagacctctttggactccacccaaagaaagagggcagcttaaagcatgggcctgaagtgggtttgggtgacctctcagaaattattggcaaggatgaaccccctacattagagagtactgtacagaagaagaggaaagctcaggcagcagaaatgaaagcagcaaatgaagcagaaggaaaagtagaatccgagaaggcagacatggaagatggagagaaggaagacaaagacaaagaagaggagcaagctgagtacctgtggacagaagtgacaaaaaagaagaagcggcggtgtggtcagaaggttgagaagccggaagctttcacagccaatttctttaaagggctggaaatctatcagaccaagttactgcattacctggccaggaatttctacaacctgaggttccttgctctgtttgtagccttcgctatcaacttcatcctgcttttttataaggtcactgaagaacctttagaagaagagacagaggatgttgcaaacctatggaattcctttaatgacgaggaagaggaagaagcgatggtattctttgtccttcaggagagcaccgggtatatggcaccaaccctgcgtgccctggccatcatccataccatcatctctctagtctgtgtggtgggctactactgcctgaaggtgcctttggtggttttcaaaagggaaaaagaaatcgccaggaagctggagtttgatggcctatatatcaccgaacagccatctgaagatgacatcaaggggcagtgggaccgcttggtgatcaacacaccatcttttcctaataactactgggacaagtttgtaaagagaaaggtgatcaacaagtatggagatctctacggagcagaacgcattgctgaacttctgggtttggacaaaaatgctcttgactttagcccagtagaagagaccaaagcagaagcggcttctctggtgtcatggctaagttccatagacatgaagtaccatatctggaagcttggagttgtttttactgacaactcctttctctaccttgcctggtatacaaccatgtcagtcctgggccactacaataacttcttctttgctgctcacctattggacatcgcaatgggcttcaagacactgaggaccattctgtcatctgtaactcacaatggcaaacagttggttctgactgtcggtctcctggccgtggtggtttatctctatactgtggtggctttcaacttcttccgcaagttctacaacaaaagcgaagacgatgacgagcccgatatgaagtgcgacgacatgatgacgtgttaccttttccacatgtacgtgggagtgagagcaggaggtggcattggtgatgaaattgaagaccctgctggtgatccttatgaaatgtatcgcattgtctttgacattacctttttcttcttcgtcattgtcatcttgctggccatcattcaaggtcttattattgatgctttcggagagctaagagaccagcaggaacaagtacgagaagatatggagactaaatgtttcatctgtgggattggcaatgactactttgacacaacccctcatggttttgaaacacatacattacaagagcacaacttagccaactacttgttctttctgatgtatttgattaataaagatgaaacagagcacacgggtcaggaatcttatgtctggaagatgtaccaagaaaggtgttgggatttcttcccagccggtgactgctttcgtaaacaatatgaagatcagcttggataaatctgaatcaaagaagcgcgacaattctggacagtcaacttcccatgaaataaagtcccctttttacagttctgcaacatatctgaaatgtgacattttctaaatgcctcccttaaaaaaaaaactgctgaaaatctgtgctattttgaaattgatttggctttttgtgcctaatggacatacactgtgggagagaacctgtcaaaatgtcgaagaaggaaggcgaagaatcaagtaatctctaggcaaatgccttcaagttttccagttctgaggtaactagttcagtttgttgggatggaagcatgaaggaaagggctagagaagtatgaaatctcgaatgtgtaatacctgaaaatttaaacacttgaatgtcatcatggtatccaacttgtgactcatagggtctgaactcactccaaaagataataactgcagtctaatttttcccatggtacttgctagtgactgtatccagaaaagctttaagcagttaaagaaacagaaaaaaaccgacactttgtcgacactgaaatatcgattaagtgccttaaaacctctttagacatagctatgcaagttttttatgtttgtgttccagaaggacagttccattcattagttgtgatcttccgtcttactttatgaaactgcacttgaaggttattcatacaagtttttttagtaacagctgtcagtcaactgctgttattagaagaaaagtactgtactgaaaattcagaaaaaaaaatctcaaccttatgccaaaatggagtaatgctttatggtcccttgtaagtagtggagctgctctgtttaggtgaatctcctcaaatacaatgaagtgcccactgcaataaagtaatacgtaccaataaaaa

SEQ ID NO: 1501 - DNA, 461 bp, Artificial Sequence
  Description of Artificial sequences:primer
  misc_feature (1)..(461): 3' terminal sequence from clone image:726342. collagen, type vi, alpha 1(COL6A1) gene.
gaggagtgaaaacctttatttggaaaagtcagcaacatggatatggttcagaaaaaaacacagaaggagcaaaactaacatgaacatagaaagggggcctttgataaaacgtcgaacacatcactattctgaggaaggagaggtttgcgttgtttctagtaagacacagccctctgtggcaccaaggggctctcatgtccagtccaggccccagtctctgcgggagggaggagcagacggggttagcaccgttaatctcgagggtcttgagtgcagccagcgcccctgcgagtactctctgaggtcggggtcagtgctggtcagcagcggcctccagggctgtagggccaaggtccaggccggtcaccagcaggaccctcaggagacggggccgagtcgccgagatttatgtctgcaacggcctcctgaccttggtttcccaaaacgagacagaggccaat

SEQ ID NO: 1502 - DNA, 429 bp, Artificial Sequence
  Description of Artificial sequences:primer
  misc_feature (1)..(429): 5' terminal sequence from clone image:726342. collagen, type vi, alpha 1(COL6A1) gene.
ctgccctgccctcctgcccgccctccctcctgcctgcgcctccttccctaggcacctctgtgctgcgtcccaccagcctgagcaagacgccctctcggggcctgtgccgcactagcctccctctcctctgtccccatagctggtttttcccaccaatcctcacctaacagttactttacaattaaactcaaagcaagctcttctcctcagcttggggcagccattggcctctgtctcgttttgggaaaccaaggtcaggaggccgttgcagacataaatctcggcgactcggccccgtctcctgagggtcctgctggtgaccggcctggaccttggccctacagccctggaggccgctgctgaccagcactgaccccgacctcagagagtactcgcaggggcgctggctgcactcaagaccctcgagat

SEQ ID NO: 1503 - DNA, 252 bp, Artificial Sequence
  Description of Artificial sequences:primer
  misc_feature (1)..(252): 3' terminal sequence from clone image:726779. calponin 1, basic, smooth muscle(CNN1) gene.
gagattttacagccatttattgtgctccagtgaaatagaaaaaaaagaaagtgctctcattacaaacgccactgtcacatccacatagtatgccagtcgctgcaaaccaaaccgcgtgtgtccgctgggtctctgggcatgcagtttgctcccactgcgggaatggggtgggggcaggccgagcctgggctctgggggctttgctgggggagcttctggtcctgggggtacccacttgtgagggagtggggg

SEQ ID NO: 1504 - DNA, 1605 bp, Artificial Sequence
  Description of Artificial sequences:primer
  misc_feature (1)..(1605): calponin 1, basic, smooth muscle(CNN1) gene.
agcggggcaggcccctacagccaatggaacggccctggaagagacccgggtcgcctccggagcttcaaaaacatgtgaggagggaagagtgtgcagacggaacttcagccgctgcctctgttctcagcgtcagtgccgccactgcccccgccagagcccaccggccagcatgtcctctgctcacttcaaccgaggccctgcctacgggctgtcagccgaggttaagaacaagctggcccagaagtatgaccaccagcgggagcaggagctgagagagtggatcgagggggtgacaggccgtcgcatcggcaacaacttcatggacggcctcaaagatggcatcattctttgcgaattcatcaataagctgcagccaggctccgtgaagaagatcaatgagtcaacccaaaattggcaccagctggagaacatcggcaacttcatcaaggccatcaccaagtatggggtgaagccccacgacatttttgaggccaacgacctgtttgagaacaccaaccatacacaggtgcagtccaccctcctggctttggccagcatggcgaagacgaaaggaaacaaggtgaacgtgggagtgaagtacgcagagaagcaggagcggaaattcgagccggggaagctaagagaagggcggaacatcattgggctgcagatgggcaccaacaagtttgccagccagcagggcatgacggcctatggcacccggcgccacctctacgaccccaagctgggcacagaccagcctctggaccaggcgaccatcagcctgcagatgggcaccaacaaaggagccagccaggctggcatgactgcgccagggaccaagcggcagatcttcgagccggggctgggcatggagcactgcgacacgctcaatgtcagcctgcagatgggcagcaacaagggcgcctcgcagcggggcatgacggtgtatgggctgccacgccaggtctacgaccccaagtactgtctgactcccgagtacccagagctgggtgagcccgcccacaaccaccacgcacacaactactacaattccgcctagggccacaaggccttccctgttttccccccaagggaggctgctgctgctcttggctggacccagccaggcccagccgaccccctctccctgcatggcatcctccagcccctgtagaactcaacctctacagggttagagtttggagagagcagactggcggggggcccattggggggaaggggaccctccgctctgtagtgctacagggtccaacatagagccgggtgtccccaacagcgcccaaaggacgcactgagcaacgctattccagctgtccccccactccctcacaagtgggtacccccaggaccagaagctcccccagcaaagcccccagagcccaggctcggcctgccccccaccccattcccgcagtgggagcaaactgcatgcccagagacccagcggacacacgcggtttggtttgcagcgactggcatactatgtggatgtgacagtggcgtttgtaatgagagcactttcttttttttctatttcactggagcacaataaatggctgtaaaatctcaaaaaaaaaaaaa

SEQ ID NO: 1505 - DNA, 418 bp, Artificial Sequence
  Description of Artificial sequences:primer
  misc_feature (1)..(418): 3' terminal sequence from clone image:72694. inter-alpha (globulin) inhibitor, h1 polypeptide(ITIH1) gene.
  misc_feature (155)..(155): n is a, c, g, or t
  misc_feature (165)..(165): n is a, c, g, or t
  misc_feature (186)..(186): n is a, c, g, or t
  misc_feature (216)..(216): n is a, c, g, or t
  misc_feature (291)..(291): n is a, c, g, or t
  misc_feature (327)..(327): n is a, c, g, or t
  misc_feature (343)..(343): n is a, c, g, or t
  misc_feature (374)..(374): n is a, c, g, or t
  misc_feature (404)..(404): n is a, c, g, or t
ttttttggacacggcctctctttaatggaaggcatgaggtgctttgacacaaggaaccagcttagtcaaggaggtacagcctcagcagcaggtcaggatgtcgtcctcctcctctgccttggcccgggggaggacaggcgtgctggccagagggntcagaagatntcggggacgatataatcagtntaggcaccatcgatgagtccagccccattnttgtgaatgaaccagcaggacacctcggccccatgccacgggtccttgctgtagtctttttgcaaacccctgggngaccgtgagccggcggttcctcaccaccatcgtggncatctggctttgtggnggtcgggagcctggggtgggatttcagacantttcaaaaccgatggggtgggaaaaatttnccccagcagcccgt

SEQ ID NO: 1506 - DNA, 2920 bp, Artificial Sequence
  Description of Artificial sequences:primer
  misc_feature (1)..(2920): inter-alpha (globulin) inhibitor, h1 polypeptide(ITIH1) gene.
acagggcagcaggagccttagagcatggacggtgccatggggcctcgggggctgctgttgtgcatgtacctggtatctctcctcatcctgcaggccatgcctgccctgggctcggctacaggcaggtccaagagcagcgagaagcgacaggctgtggacaccgctgtcgatggcgtgttcatccggagtttgaaagtcaactgcaaagtcacctctcgcttcgcccactatgttgtcaccagccaagtggtcaacactgccaatgaagccagggaagtggccttcgacctggaaatccccaagacagcattcatcagtgactttgccgttacagcagatggaaacgcatttatcggagacataaaggacaaggtgactgcatggaagcagtaccggaaagcagctatctcaggagagaatgccggccttgtcagggcctcggggagaactatggagcaattcaccatccacctcaccgtcaatccccagagcaaggtcacgtttcagctgacttatgaggaagtgctgaagagaaaccatatgcagtatgaaattgtcatcaaagtcaagcccaagcagctggtgcatcattttgagattgatgtggacatcttcgagccccaggggatcagcaagctggatgcccaggcctctttcctgccgaaggaactggcagcccaaactatcaagaagtccttctcaggaaaaaagggtcatgtgctgttccgtcccaccgtgagccagcagcagtcctgccccacatgctctacatccttactgaacgggcacttcaaggtgacctacgatgtcactcgagacgagatctgcgacctcctggtggccaataaccactttgcccacttctttgccccccaaaacctgacaaacatgaacaagaacgtggtttttgtgattgacatcagtggctccatgagaggccagaaagtgaagcagaccaaggaggcactccttaaaattctgggggacatgcagccaggggactactttgacctggttctttttgggactcgagtacaatcgtggaagggctcgctggtgcaagcatctgaggccaacctacaagcagctcaagactttgtgcggggcttttccctggatgaggccacaaacctgaatggaggtttgctccggggaattgagatcttgaaccaagttcaggaaagcctcccagaactcagcaaccatgcctcaatactcatcatgttgacagatggcgatcccacagagggggtgacggaccgttcccaaatcctcaagaacgtccgcaacgccatccggggcaggttcccgctctacaacctgggtttcggccacaatgtggactttaactttctggaggtcatgtccatggagaacaacggacgggcccagagaatctacgaggaccatgatgccacccagcagctgcagggtttctacagccaggtagccaaacccctgctggtggatgtggatttgcagtacccccaggatgctgtcttggccctgacccagaaccaccataaacagtactacgaaggctcagagattgtggtggccgggcgcattgctgacaacaaacagagcagcttcaaggctgatgtgcaggcccatggggagggacaagaattcagtataacctgcctagtggatgaggaggagatgaagaaactgctccgagagcgtggccacatgctggagaaccacgtcgagcgcctctgggcctacctcaccatccaggagctgctggccaagcggatgaaggtggacagggaggtgagggccaacctgtcatcccaggccctgcggatgtcgctggactatgggtttgtgaccccactgacctccatgagcatcaggggcatggcggaccaggacggcctgaagcccaccatcgacaagccctcagaggattctccgcctttggagatgctgggacccagaaggacgttcgtgctgtcagccttgcagccttctcctactcattccagctccaatacccagcggctgccagaccgagtgaccggcgtggacacagaccctcacttcatcatccacgtgccccagaaagaggacaccctgtgcttcaacatcaatgaggagcctggtgttatcctgagcctggtacaggaccccaacacaggcttctcagtgaatggacagctcattggcaacaaggccaggagccctgggcagcatgacggcacgtacttcgggcggctgggaatcgcaaaccctgccacggactttcagttggaagtgactcctcagaacattacgctgaaccccggctttggtgggcctgtgttttcctggagggaccaagctgtgctgcggcaggacggggtggtggtgaccatcaacaagaagaggaacctggtggtgtctgtggacgacggtggcacctttgaggttgttttgcaccgagtgtggaaggggagctcggtccaccaggacttcctgggcttctatgtgctggacagtcatcggatgtcagcccggacgcacgggctgctggggcaatttttccaccccatcggttttgaagtgtctgacatccacccaggctccgaccccacaaagccagatgccacgatggtggtgaggaaccgccggctcacggtcaccaggggtttgcaaaaagactacagcaaggacccgtggcatggggccgaggtgtcctgctggttcattcacaacaatggggctggactcatcgatggtgcctacactgattatatcgtccccgacatcttctgagccctctggccagcacgcctgtcctcccccggggccaaggcagaggaggaggacgacatcctgacctgctgctgaggctgtacctccttgactaagctggttccttgtgtcaaagcacctcatgccttccattaaagagaggccgtgtccaaaaaaaaaa

SEQ ID NO: 1507 - DNA, 541 bp, Artificial Sequence
  Description of Artificial sequences:primer
  misc_feature (1)..(541): 3' terminal sequence from clone image:727792. phosphodiesterase 1a, calmodulin-dependent(PDE1A) gene.
  misc_feature (469)..(469): n is a, c, g, or t
tttagccgctcaaagaaaatttattggcactcggtaaagacaatgccacaaaatgccattgaaacagatatctgaaagcacaaggtgctgatgtagccactagatgaatctgttcggtagcagttgagcccggtgaattaaggagtttacagctgttatttatgtggctcatgatgcttattgagcaatctgcaaaaatagatttcctgtctcacacaggacagggtagatttccagcaagcataatcaaaatctccaagtcttttggtcaaattagagctgccaccatgcacgaggttttacttaaaggtgtttactgatgaataaactcacacttctgtgaactggttcttgcttcttgtgcagctaactctttccacctctctttgttctgctgaatgatgtccaccaggttgttcttgaaactcttcaggtccactgctgcaagggagtagtctggggaataggnaccatcactcatggaggcctttgtatttgatcgtctaagtgcatcagccatgtggtaccccacaatgtgggt

SEQ ID NO: 1508 - DNA, 473 bp, Artificial Sequence
  Description of Artificial sequences:primer
  misc_feature (1)..(473): 5' terminal sequence from clone image:727792. phosphodiesterase 1a, calmodulin-dependent(PDE1A) gene.
acagtttgcagcagcctgaagggattgacagagccaaaaccatgtccctgattctccacgcagcagacatcagccacccagccaaatcctggaagctgcattatcggtggaccatggccctaatggaggagtttttcctgcagggagataaagaagctgaattagggcttccattttccccactttgtgatcggaagtcaaccatggtggcccagtcacaaataggtttcatcgatttcatagtagagccaacattttctcttctgacagactcaacagagaaaattgttattcctcttatagaggaagcctcaaaagccgaaacttcttcctatgtggcaagcagctcaaccaccattgtggggttacacattgctgatgcactaagacgatcaaatacaaaaggctccatgagtgatgggtcctattccccagactactcccttgcagcagtggacctgaagagtttcaag

SEQ ID NO: 1509 - DNA, 2322 bp, Artificial Sequence
  Description of Artificial sequences:primer
  misc_feature (1)..(2322): phosphodiesterase 1a, calmodulin-dependent(PDE1A) gene.
ggtggggtggtgagcagtggatatatgcctgtcaaagtcaatagcaaatctgtcagagtcttccctcagctttgtacatcagcactgttttgatagataagagaggctactgtataagtgtgtaagatttgtaatggactgaggaatgcttgttctagctgctgaaactgactgtaactgtattgtcttaggagcatcatcatggggtctagtgccacagagattgaagaattggaaaacaccacttttaagtatcttacaggagaacagactgaaaaaatgtggcagcgcctgaaaggaatactaagatgcttggtgaagcagctggaaagaggtgatgttaacgtcgtcgacttaaagaagaatattgaatatgcggcatctgtgctggaagcagtttatatcgatgaaacaagaagacttctggatactgaagatgagctcagtgacattcagactgactcagtcccatctgaagtccgggactggttggcttctacctttacacggaaaatggggatgacaaaaaagaaacctgaggaaaaaccaaaatttcggagcattgtgcatgctgttcaagctggaatttttgtggaaagaatgtaccgaaaaacatatcatatggttggtttggcatatccagcagctgtcatcgtaacattaaaggatgttgataaatggtctttcgatgtatttgccctaaatgaagcaagtggagagcatagtctgaagtttatgatttatgaactgtttaccagatatgatcttatcaaccgtttcaagattcctgtttcttgcctaatcacctttgcagaagctttagaagttggttacagcaagtacaaaaatccatatcacaatttgattcatgcagctgatgtcactcaaactgtgcattacataatgcttcatacaggtatcatgcactggctcactgaactggaaattttagcaatggtctttgctgctgccattcatgattatgagcatacagggacaacaaacaactttcacattcagacaaggtcagatgttgccattttgtataatgatcgctctgtccttgagaatcaccacgtgagtgcagcttatcgacttatgcaagaagaagaaatgaatatcttgataaatttatccaaagatgactggagggatcttcggaacctagtgattgaaatggttttatctacagacatgtcaggtcacttccagcaaattaaaaatataagaaacagtttgcagcagcctgaagggattgacagagccaaaaccatgtccctgattctccacgcagcagacatcagccacccagccaaatcctggaagctgcattatcggtggaccatggccctaatggaggagtttttcctgcagggagataaagaagctgaattagggcttccattttccccactttgtgatcggaagtcaaccatggtggcccagtcacaaataggtttcatcgatttcatagtagagccaacattttctcttctgacagactcaacagagaaaattgttattcctcttatagaggaagcctcaaaagccgaaacttcttcctatgtggcaagcagctcaaccaccattgtggggttacacattgctgatgcactaagacgatcaaatacaaaaggctccatgagtgatgggtcctattccccagactactcccttgcagcagtggacctgaagagtttcaagaacaacctggtggacatcattcagcagaacaaagagaggtggaaagagttagctgcacaaggtgaatctgatcttcataagaactcagaagacttagtaaatgctgaagaaaaacatgatgagacacattcataggcccgaaacaccttaaagacttctgtcattttaaacatgagaggacaatgaaatcagcatgaaaacatcctaaattctcaactttccacaaagctatggctcttctttcaacatagaattggattgggccattttaattgactcctatacaaggaattaagaagaacataaattttgagctagtaactctggccaaataaatacactcaagtttttatcagagtttttggccagtgcttctgccatttttttccctccacaatttggccttcttcaatcaagccagataaatttttgagacaaaagccagacagtttttaatttttcttgctttgaaccctgtcgtaatgactgtgcaatacatgtgcagaagatgaggtattttaaaatttacttccttgcactgtcttacacagagtgctataactataaatttttcaaggtcttaaataaaaggaagcaaaaacaaaaaaaaaaaaaaaa

SEQ ID NO: 1510 - DNA, 472 bp, Artificial Sequence
  Description of Artificial sequences:primer
  misc_feature (1)..(472): 3' terminal sequence from clone image:72789. signal sequence receptor, beta (translocon-associated protein beta)(SSR2) gene.
  misc_feature (157)..(157): n is a, c, g, or t
  misc_feature (199)..(199): n is a, c, g, or t
  misc_feature (215)..(215): n is a, c, g, or t
  misc_feature (256)..(256): n is a, c, g, or t
  misc_feature (262)..(262): n is a, c, g, or t
  misc_feature (270)..(270): n is a, c, g, or t
  misc_feature (343)..(343): n is a, c, g, or t
  misc_feature (354)..(354): n is a, c, g, or t
  misc_feature (442)..(442): n is a, c, g, or t
  misc_feature (453)..(453): n is a, c, g, or t
ttttttttttcaatgtggcatttgtttttattagaaaaccccttagtaagcacttctctaacccagaatagacactgggtatcctccaagagtcccatagctttcatttcatcttccaccctcttctgagagggggaggcaggggataggggtggtntcaggcagtctccaaaatgcccctcctagacccctgagaganttcacgttgccagcantaaaccaacagcacctcagtgggggcatcagaggggccctntagggnttcaaggntatttgccaaagggatttcctgttttatgggctttcacggatggggaaccaagggagggctttttcgcaggantcctagggggnttgggtcctttcacttattgggcttgaggaagcaggggcagggatccaggggggagaaagttgggcccaaggggttttaaggaggagnaaggagttttncatttttaaggataccctt

SEQ ID NO: 1511 - DNA, 322 bp, Artificial Sequence
  Description of Artificial sequences:primer
  misc_feature (1)..(322): 5' terminal sequence from clone image:72789. signal sequence receptor, beta (translocon-associated protein beta)(SSR2) gene.
  misc_feature (73)..(73): n is a, c, g, or t
  misc_feature (215)..(215): n is a, c, g, or t
  misc_feature (228)..(228): n is a, c, g, or t
  misc_feature (286)..(286): n is a, c, g, or t
  misc_feature (291)..(291): n is a, c, g, or t
  misc_feature (301)..(301): n is a, c, g, or t
  misc_feature (307)..(307): n is a, c, g, or t
gccctctcaaggctggttatttcaactttcacctcggcaacaattacttacctggcccaggaggatgggccgnttgtgattggctctaccagtgcacctggacagggaggaatcctgggctcagcgggagtttgacaggcgattctcccctcattttctgggactgggcagcctttggggtcatgacctttccctccattcggcattccccctgntatttgttggtanttccagcaagagggaatattgacacttcccaaaacgaaggaaggacttgattgggggntttcnaaaagccttncttttncccaagaatccaggg

SEQ ID NO: 1512 - DNA, 1093 bp, Artificial Sequence
  Description of Artificial sequences:primer
  misc_feature (1)..(1093): signal sequence receptor, beta (translocon-associated protein beta)(SSR2) gene.
ggctctcttcctgtctttgtggctccggaaaggcgtttgggatgccaacgatgaggctgctgtcatttgtggtgttggctctatttgctgtcactcaagcagaggaaggagccaggcttttggcttccaaatcactgctgaacagatacgccgtggagggacgagacctgaccttgcagtacaacatctacaatgttggctcaagtgctgcattagacgtggaactatctgatgattccttccctccagaagactttggcattgtgtctggaatgctcaatgtcaaatgggaccggattgcccctgctagcaatgtctcccacactgtggtcctgcgccctctcaaggctggttatttcaacttcacctcggcaacaattacttacctggcccaggaggatgggcccgttgtgattggctctaccagtgcacctggacagggaggaatcctggctcagcgggagtttgacaggcgattctcccctcattttctggactgggcagcctttggggtcatgacccttccctccatcggcatccccctgctattgtggtactccagcaagaggaaatatgacactcccaaaacgaagaagaactgattggggcttccacagccctcctctcccaagaaatccaggctcctctcccaagaaatccaggtgctttccagactccaaagggtatcttaaatgcaatctcttctctcttagcccttggccactttctcctggatcctgccctgctctcagccatagtgaaggaccagccctaggagtctgcgagagcctccttggttccatcgtgaagccataaacaggaatgcctttggcaatagccttgagcctagagggccctctgatgccccactgaggtgctgttggtttattgctggcaacgtgaattctctcaggggtctaggaggggcattttggagactgcctgacaccacccctatcccctgcctccccctctcagaagagggtggaagatgaaatgaaagctatgggactcttggaggatacccagtgtctattctgggttagagaagtgcttactaaggggttttctaataaaaacaaatgccaattgc

SEQ ID NO: 1513 - DNA, 510 bp, Artificial Sequence
  Description of Artificial sequences:primer
  misc_feature (1)..(510): 3' terminal sequence from clone image:730787. nuclear transcription factor y, alpha(NFYA) gene.
aaaaataaccccctcgtatctcaggaatttattgtttccgtatcacaagatagaacttccttgcctggaagccatctctgaatacaaagcgtccattcagttagtcagtgtgagattcccccaccagagggataaatgctgtctagattccatgggaaggagtgggctgctgctttcctgattgcagttttggttgagaaggttgttcttccctgctgagatggctggctgacttcaccagtcaaggtaagtgctttgtgtactgctggggtggcatgtgtctccctgcatcatcccgaatccatgaaatgtcaatgtcatcaacagtctgaaataggtcctgactgaaagagtaagaccaaggcttgcaacttccaattgccaggcatcgctgcaattgtaataccgagccaactattaaaactaagtggtttccgctccgtagtaaagcgcaaatgtggtactaaatgtcccatggaagattgatcaatcccggaccgtgcgaacatg

SEQ ID NO: 1514 - DNA, 537 bp, Artificial Sequence
  Description of Artificial sequences:primer
  misc_feature (1)..(537): 5' terminal sequence from clone image:730787. nuclear transcription factor y, alpha(NFYA) gene.
gccgatgaaagaagcaatgacacagatcatccgagtgtcctaaccccacgccatgtgatggagctgatcaaggtcatgtttctcactgttccaggaaattgatcaactcttccaatgggacattgatgatcacattctgccctttactacaggacagaaaccacttagtttttaataagtggctcagtattacaattgcagcgatgcctggcaaattgaagttgcaagcctttgtcttactctttcagtcaggacctatttcagactgttgatgacattgacatttcatggattcggatgatgcaaggagacacatgccaccccagcagtacacaaagcacttaccttgactggtgaagtcagccagccatctcagcagggaagaacaaccttctcaaccaaaactgcaatcaggaaagcagcagcccactccttcccatggaatctagacagcatttatccctctggtgggggaatctcacactgactaactgaatggacgctttgtattcagagatggcttccaggcaaggaagt

SEQ ID NO: 1515 - DNA, 2834 bp, Artificial Sequence
  Description of Artificial sequences:primer
  misc_feature (1)..(2834): nuclear transcription factor y, alpha(NFYA) gene.
tttgctaggcagcggcagtggcggcggcagcggcggctggagcctcctgattgggtttcggagtccggtactggagccaatcagcgcgggcagcgaaccgggggagcgaggcacggagtgtacctcacagccttctaggatctccagagtggacaggaatctcacttggagggaccatggagcagtatacagcaaacagcaatagttcgacagagcagattgttgtccaggcaggacagattcagcagcagcagcagggtggtgtcactgctgtgcagttgcagactgaggcccaggtggcatccgcctcaggccagcaagtccagaccctccaggtagtccaagggcagccattaatggtgcaggtcagtggaggccagctaatcacatcaactggccaacccatcatggtccaggctgtccctggtggacaaggtcaaaccatcatgcaagtacctgtttctggaacacagggtttgcagcaaatacagttggtcccacctggacagatccagatccagggtggacaggctgtgcaggtgcagggccagcagggccagacccagcagatcatcatccagcagccccagacggctgtcactgctggccagactcagacacagcagcagattgctgtccagggacagcaagtggcacagactgctgaagggcagaccatcgtctatcaaccagttaatgcagatggcaccattctccagcaagttacagtccctgtttcaggcatgatcactatcccagcagccagtttggcaggagcacagattgttcaaacaggagccaataccaacacaaccagcagtgggcaagggactgtcactgtgacactaccagtggcaggcaatgtggtcaattcaggagggatggtcatgatggttcctggggctggctctgtgcctgctatccaaagaatccctctacctggagcagagatgcttgaagaagagcctctctacgtgaatgccaaacaataccaccgtattcttaagaggaggcaagcccgagctaaactagaggcagaagggaaaattccaaaggagagaaggaaatacctgcatgagtctcggcaccgtcatgccatggcacggaagcgtggtgaaggtggacgatttttctctccaaaggaaaaggatagtccccatatgcaggatccaaaccaagccgatgaagaagcaatgacacagatcatccgagtgtcctaaccccacgccatgtgatggagctgatcaaggtcatgtttctcactgttccaggaaattgatcaactcttccaatgggacattgatgatcacattctgccctttactacaggacagaaaccacttagtttttaataagtggctcagtattacaattgcagcgatgcctggcaaattgaagttgcaagcctttgtcttactctttcagtcaggacctatttcagactgttgatgacattgacatttcatggattcggatgatgcaaggagacacatgccaccccagcagtacacaaagcacttaccttgactggtgaagtcagccagccatctcagcagggaagaacaaccttctcaaccaaaactgcaatcaggaaagcagcagcccactccttcccatggaatctagatagcatttatccctctggtgggggaatctcacactgactaactgaatggacgctttgtattcagagatggcttccaggcaaggaagttctatcttgtgatacggaaacaataaattcctgagatacattcttccaatctgtggtaataataagaattcctctctgcccagatggtaggttgatatttctggactctagccaagaaaaagctaattctggggatagaatgataaaagactcaagcactaaaaatatacattgccgaatctctttttctagctttgaaaagttgtggcctgcttgtccctctgttgactggtcatctggaccatcgtacttgctgtggctacttctaagacaatgtagagggttattaaaccttgaaactgcctttcctaagtagagaacaagactattcaacaacttctttgctgaagcactgaggagatttgtaatactcctaaaggaagggccaaactagagattttcaatcatagactttgtgacagcatttggggaactaaaagattcatgtgtttcagcctagtgggagagagtgggggagaggaagagagagagagagcatgtatacccgtatgttatcatagagcacgattctccagtggatggatacctggaatggatcattaagatgaagagagtaattcacatttactctagaacctttaacaagcactgaaaggaagaagcctgagatttgatccttgacaatttctggaaagcactggtcagtcacactgtcctggacagagtccaagttacccactaaagcttgaggtggatgttggcttcactcctgcagcacaatgctggccctagaaagcgagcattttcattcttcccatggcagctgattctttggtgccagttttcatgttttctccataggccttgtgcagaaaggttttctcattgcatccatactgtgagaataaactgcagactgaaagaaacatgcctgcagggtcaggaactgggccactgttcccagaacgggttgtgcctcagaaatctatttctcttttagatgttgaaccctgagagaactaagatgatatttcagaagagttggctgccttctctggaaacaaggaaaacccaataattccgaggaacattgggggttaaataccaagaataaaaattggttcttctttgaaaaaaaaaaagaaaaaaaaaaaaaaaa

SEQ ID NO: 1516 - DNA, 405 bp, Artificial Sequence
  Description of Artificial sequences:primer
  misc_feature (1)..(405): 3' terminal sequence from clone image:73590. ribosomal protein s7(RPS7) gene.
  misc_feature (377)..(377): n is a, c, g, or t
  misc_feature (397)..(397): n is a, c, g, or t
ttttttgtgaatatatactttttatttagtcatttttgtttacaattgaaactctgggaattcaaaattaacatccttgcccgtgagcttcttatagacaccagaaaaagtttcaaccttgtgttccacattgttctgctgtgctttgtccaaatgaacctttatgagccggctgccatctagtttgacgcggattctcttgcccacaatttcgcttggggaagaccaagtcctcaagggatgggcatcgtgcacagctgtcagagtacgggctcctgggggacggcttttgcttattttttgtacgggctttttcgagttgggcttagggcaggaattctccctctgagggcggataaaggacggacatggctttnccccactggaaccttttttnctcccaat

SEQ ID NO: 1517 - DNA, 415 bp, Artificial Sequence
  Description of Artificial sequences:primer
  misc_feature (1)..(415): 5' terminal sequence from clone image:73590. ribosomal protein s7(RPS7) gene.
  misc_feature (64)..(64): n is a, c, g, or t
  misc_feature (89)..(89): n is a, c, g, or t
  misc_feature (337)..(337): n is a, c, g, or t
  misc_feature (346)..(346): n is a, c, g, or t
caagttctcccaggagaaagccatgttcagttcgagcgccaagatcgtgaagcccaatggcgangaagcggacgagttcgagtccgcantctcccaggctcttctggagctggagatgaactcggacctcaaggctcagctcagggagctgaaatattacggcagctaaggaaattgaagttggtggtggtcggaaagctatcataatctttgttcccgttcctcaactgaaatctttccagaaaatccaagtccggctagtacgcgaattgggagaaaaagttcagtggggaagcattgtcgtctttattcgcttcagagggagaattcttgcctnaagcccaantcgaaaaaagccgtacaaaaattaagcaaaagcttcccaggggccgtattctgacagttttcacgttgc

SEQ ID NO: 1518 - DNA, 729 bp, Artificial Sequence
  Description of Artificial sequences:primer
  misc_feature (1)..(729): ribosomal protein s7(RPS7) gene.
cttgcttcggacgccggattttgacgtgctctcgcgagatttgggtctcttcctaagccggcgctcggcaagttctcccaggagaaagccatgttcagttcgagcgccaagatcgtgaagcccaatggcgagaagccggacgagttcgagtccggcatctcccaggctcttctggagctggagatgaactcggacctcaaggctcagctcagggagctgaatattacggcagctaaggaaattgaagttggtggtggtcggaaagctatcataatctttgttcccgttcctcaactgaaatctttccagaaaatccaagtccggctagtacgcgaattggagaaaaagttcagtgggaagcatgtcgtctttatcgctcagaggagaattctgcctaagccaactcgaaaaagccgtacaaaaaataagcaaaagcgtcccaggagccgtactctgacagctgtgcacgatgccatccttgaggacttggtcttcccaagcgaaattgtgggcaagagaatccgcgtcaaactagatggcagccggctcataaaggttcatttggacaaagcacagcagaacaatgtggaacacaaggttgaaactttttctggtgtctataagaagctcacgggcaaggatgttaattttgaattcccagagtttcaattgtaaacaaaaatgactaaataaaaagtatatattcacagtaaaaaaaaaaaaaaaaaa

SEQ ID NO: 1519 - DNA, 214 bp, Artificial Sequence
  Description of Artificial sequences:primer
  misc_feature (1)..(214): 3' terminal sequence from clone image:74834.
cgattaactgccgcagaaactcttccaggtcaccagtgcagtgcttgataacaggagtcttcccaggatggcgaacaacaagaaactggtttccgtcttcacggacttcgttgctttccagtttagcaatacgcttactcccatccgagataacaccttcgtaatactcacgctgctcgttgagttttgattttgctgtttcaagctcaacacg

SEQ ID NO: 1520 - DNA, 406 bp, Artificial Sequence
  Description of Artificial sequences:primer
  misc_feature (1)..(406): 3' terminal sequence from clone image:754018. supervillin(SVIL) gene.
aagaattctttcttctttggttcaaagatttgtcttaattctgcaactttaggaagtgcaactaaaagctgagcatcgattcctctttcgtggttagcgagctgttctttatcttcgagtgagaactccttctgaaagcttgaaactttcctttgacgtgggaatccaaggaagcttaagtttttcttgttgaaatttcaaatttctgtataatcctcgttcctctaagttaaagggggaaagaaaatcacactgcaattccttatttttctaatttaaaaaacaaaacaaaacacgttataccctcgaatccagcttttgatgtcttcgagtattttcttggagtctctttccaatgaatactactttcaaattctaagcacaaagtaaaatcccaaaagttagc

SEQ ID NO: 1521 - DNA, 8300 bp, Artificial Sequence
  Description of Artificial sequences:primer
  misc_feature (1)..(8300): supervillin(SVIL) gene.
cactgctctgactgcgtcctccccaggctgaagtgtcctcaggtttcatgtggatttgcccagtaatggatggctccaccgaggccaggttggggaagttcagcctcgaggacactaggggacgaaaaacttcaaaaagaagactctttttattaatattttggcgttctttttggagaggaacttttgggatgtagcctttacctgtttcctgaatttgacatccaaaaagccttttggaaaacaccattctaaatttatcctgttctgaatcatcatcgcttctgatagatgcagttgcttgctgacatcgtgatctttgattttgtacaacgctatttgggctaacttttgggattttactttgtgcttagaatttgaaagtagtattcattggaaagagactccaagaaaatactcgaagacatcaaaagctggattcgagggtataacgtgttttgttttgttttttaaattagaaaaataaggaattgcagtgtgattttctttccccctttaacttagaggaacgaggattatacagaaatttgaaatttcaacaagaaaaacttaagcttccttggattcccacgtcaaaggaaagtttcaagctttcagaaggagttctcactcgaagataaagaacagctcgctaaccacgaaagaggaatcgatgctcagcttttagttgcacttcctaaagttgcagaattaagacaaatctttgaaccaaagaagaaagaattcttagaaatgaaaagaaaagaaagaattgccaggcgcctggaaggaattgaaaatgacactcagcccatcctcttgcagagctgcacaggattggtgactcaccgcctgctggaggaagacacccctcgatacatgagagccagcgaccctgccagcccccacatcggccgatcaaatgaagaggaggaaacttccgattcttctctagaaaagcaaactcgatccaaatactgcacagaaacctccggtgtccacggtgactcaccctatggttcgggtaccatggacacccacagtctggagtccaaagccgaaagaattgcaaggtacaaagcagaaagaaggcgacagctggcagagaagtatgggctgactctggatcccgaggccgactccgagtatttatcccgctataccaagtccaggaaggagcctgatgctgtcgagaagcggggaggaaaaagtgacaaacaggaagagtcaagcagagatgcgagttctctgtaccccgggaccgagacgatggggctcaggacctgtgccggtgaatccaaggactatgccctccatgcgggtgacggctcttccgacccggaggtgctgctgaacatagaaaaccaaagacgaggtcaagagctgagtgccacccggcaggcccatgacctgtccccagcagccgagagttcctcgaccttctctttctctgggcgagactcctccttcactgaagtgccacggtcccccaagcacgcccacagctcctccctgcagcaggcagcctcccggagcccctcctttggtgacccacagctatcccctgaggcccgacccagtacagggaaacccaaacatgagtggtttctccagaaagattccgaaggggacacaccttcacttatcaactggccttccagagttaaagttagagaaaaattggtgaaagaggaaagtgctcgaaacagccctgaactcgcctcagagtccgtaactcagaggagacaccagccagcgccagtccattacgtgtcatttcagtctgagcactcagcctttgatagggtccccagcaaggcagcaggctctacacgacagccaatccgtggctatgtccaacccgcagataccggtcacaccgccaagctggtgacgccagaaaccccagaaaatgcatctgagtgtagctgggtagcatcagccacccagaatgtccccaaacctcccagcttgacggttctagaaggtgacggaagggatagcccagttctccatatctgcgagtcaaaagcagaagaagaagaaggggaaggagaaggagaagaaaaagaagaagatgtgtgcttcactgaagctctcgagcaaagcaagaaaaccctactggctttggagggtgatgggctagtgagaagcccagaagatccctctagaaatgaggactttggtaagcctgctgtgagcacagtcaccttagagcatcagaaggaactggaaaacgtggcacaaccccctcaagctccgcaccagcccactgagaggacaggcaggagcgagatggttctctacattcaaagtgagcctgtgtcccaagacgccaaaccaactggtcacaacagggaagcctcgaaaaagcgcaaggtccgtacccgctctctgtcagatttcacaggcccccctcagctccaggccttgaagtataaggacccagcttccaggagagagctggagctgcccagctccaagaccgaagggccttatggggagatcagcatgctggacacaaaggtctctgtcgcccagctccgaagtgcgttcctggcatctgccaacgcctgcaggagacctgaactcaaatcacgggtagagaggtcggctgaaggacctggcttgcccaccggtgtggaacgggagagagggtcccggaaaccaagacgctatttttctcctggtgaaagtagaaaaacttccgagagatttagaacccaacctataacttcagcagaacgaaaggaatcggataggtgcacttcacattcagaaacgccaactgtcgatgatgaagaaaaggtggatgaacgagccaagctgagcgtcgccgccaagaggttgcttttcagggagatggaaaaatcttttgatgaacaaaatgttccaaagcgacgctcaagaaacacagctgtggagcagaggctacgccgtctgcaggacaggtccctcacccagcccatcaccactgaagaggtggtcatcgcagccactgaacctatccccgcttcgtgttctgggggcacccaccctgtaatggcgagacttcctagccccactgtagctaggagcgctgtgcagcctgccagattgcaggcctctgctcaccaaaaggccttagccaaggaccagacaaatgagggcaaagagcttgctgagcaaggagaacctgattcctccactctaagcttggccgaaaagttggccttgtttaacaaattgtcccagccagtctcaaaagcgatttctacccggaacagaatagacacgagacagaggagaatgaacgctcgctatcaaactcagccagtcacactgggagaggtggagcaggtgcagagtggaaagctcattcctttctcacctgccgtgaacacatcagtgtctaccgtagcatccacggttgctccaatgtatgccggagatcttcgcacaaagccacctcttgaccacaatgcaagtgccactgactataagttttcttcttcaatagaaaattcggactctccagttagaagcattctgaaatcgcaagcttggcagcctttggtagagggtagcgagaacaagggaatgttgagagaatatggagagacagaaagcaagagagctttgacaggtcgagacagtgggatggagaagtatgggtcctttgaggaagcagaagcatcctaccccatcctgaaccgagccagggaaggagacagccataaggaatctaaatatgctgttcccagaagaggaagcctggaacgggcgaaccctcccatcacccacctcggggatgaaccgaaggaattttccatggctaaaatgaatgcacaaggaaacttggacttgagggacaggctgccctttgaagagaaggtggaggtggagaatgttatgaaaaggaagttttcactaagagcggcagagttcggggagcccacttccgagcagacggggacagctgctgggaaaactattgctcaaaccacagcccccgtgtcctggaagccccaggattcttcggaacagccacaggagaagctctgcaagaatccatgtgcgatgtttgctgctggagagatcaaaacgccgacaggggagggccttcttgactcacccagcaaaaccatgtctattaaagaaagattggcactgttgaagaaaagcggggaggaagattggagaaacagactcagcaggaggcaggagggcggcaaggcgccggccagcagcctgcacacccaggaagcagggcggtccctcatcaagaagcgggtcacagaaagtcgagagagccaaatgacgattgaggagaggaagcagctcatcactgtgagagaggaggcctggaagacgagaggcagaggagcggccaacgactcgacccagttcactgtggctggcaggatggtgaagaaaggtttggcgtcacctactgccataaccccagtagcctcagccatttgcggtaaaacaagaggcaccacacccgtttccaaacccctggaagatatcgaagccagaccagatatgcagttagaatcggacctgaagttggacaggctggaaacctttctaagaaggctgaataacaaagttggcgggatgcacgaaacggtgctcactgtcaccggcaaatctgtgaaggaggtgatgaagccagatgatgatgaaacctttgccaaattttaccgcagcgtggattataatatgccaagaagtcctgtggagatggatgaggacttcgatgtcattttcgatccttatgcacccaaattgacgtcttccgtggccgagcacaagcgggcagttaggcccaagcgccgggttcaggcctccaaaaaccccctgaaaatgctggcggcaagagaagatctccttcaggaatacactgagcagagattaaacgttgccttcatggagtcaaagcggatgaaagtagaaaagatgtcttccaactccaacttctcagaagtcaccctggcgggtttagccagtaaagaaaacttcagcaacgtcagcctgcggagcgtcaacctgacggaacagaactctaacaacagcgccgtgccctacaagaggctgatgctgttgcagattaaaggaagaagacatgtgcagaccaggctggtggaacctcgagcttcggcgctcaacagtggggactgcttcctcctgctctctccccactgctgcttcctgtgggtaggagagtttgcaaacgtcatagaaaaggcgaaggcctcagaacttgcaactttaattcagacaaagagggaacttggttgtagagctacttatatccaaaccattgaagaaggaattaatacacacactcatgcagccaaagacttctggaagcttctgggtggccaaaccagttaccaatctgctggagacccaaaagaagatgaactctatgaagcagccataatagaaactaactgcatttaccgtctcatggatgacaaacttgttcctgatgacgactactgggggaaaattccgaagtgctcccttctgcaacccaaagaggtactggtgtttgattttggtagtgaagtttacgtatggcatgggaaagaagtcacattagcacaacgaaaaatagcatttcagctggcaaagcacttatggaatggaacctttgactatgagaactgtgacatcaatcccctggatcctggagaatgcaatccgcttatccccagaaaaggacaggggcggcccgactgggcgatatttgggagacttactgaacacaatgagacgattttgttcaaagagaagtttctggattggacggaactgaagagatcgaatgagaagaaccccggggaacttgcccagcacaaggaagaccccaggactgatgtcaaggcatacgatgtgacacggatggtgtccatgccccagacgacagcaggcaccatcctggacggagtgaacgtcggccgtggctatggcctggtggaaggacacgacaggaggcagtttgagatcaccagcgtttccgtggatgtctggcacatcctggaattcgactatagcaggctccccaaacaaagcatcgggcagttccatgagggggatgcctatgtggtcaagtggaagttcatggtgagcacggcagtgggaagtcgccagaagggagagcactcggtgagggcagccggcaaagagaagtgcgtctacttcttctggcaaggccggcactccaccgtgagtgagaagggcacgtcggcgctgatgacggtggagctggacgaggaaaggggggcccaggtccaggttctccagggaaaggagcccccctgtttcctgcagtgtttccagggggggatggtggtgcactcggggaggcgggaagaggaagaagaaaatgtgcaaagtgagtggcggctgtactgcgtgcgtggagaggtgcccgtggaagggaatttgctggaagtggcctgtcactgtagcagcctgaggtccagaacttccatggtggtgcttaacgtcaacaaggccctcatctacctgtggcacggatgcaaagcccaggcccacacgaaggaggtcggaaggaccgctgcgaacaagatcaaggaacaatgtcccctggaagcaggactgcatagtagcagcaaagtcacaatacacgagtgtgatgaaggctccgagccactcggattctgggatgccttaggaaggagagacaggaaagcctacgattgcatgcttcaagatcctggaagttttaacttcgcgccccgcctgttcatcctcagcagctcctctggggattttgcagccacagagtttgtgtaccctgcccgagccccctctgtggtcagttccatgcccttcctgcaggaagatctgtacagcgcgccccagccagcacttttccttgttgacaatcaccacgaggtgtacctctggcaaggctggtggcccatcgagaacaagatcactggttccgcccgcatccgctgggcctccgaccggaagagtgcgatggagactgtgctccagtactgcaaaggaaaaaatctcaagaaaccagcccccaagtcttaccttatccacgctggtctggagcccctgacattcaccaatatgtttcccagctgggagcacagagaggacatcgctgagatcacagagatggacacggaagtttccaatcagatcaccctcgtggaagacgtcttagccaagctctgtaaaaccatttacccgctggccgacctcctggccaggccactcccggagggggtcgatcctctgaagcttgagatctatctcaccgacgaagacttcgagtttgcactagacatgacgagggatgaatacaacgccctgcccgcctggaagcaggtgaacctgaagaaagcaaaaggcctgttctgagtggggagacgccagaggagcctcacggtcacgtccaacaacaccactgcaccagggaaatggatatatatttttggactggtgtttttcacaaagtatttttcaatcagagttttcagaacctgacattgttaaagatactgcttgtcccggagttgtgtattttgtaaatgttcaagggaactgtttggaaacttctttccaccattcaggaggttatcagaattaataaaagtatctgttatgtgcacttaagccgcagctgctatagatagcactgccttcttgttccagctaggcaatgcctttttttttttttttgaagcagttctctttataaagtgttattttgatagtttgtggattctaaaatatatatatatttatataaacaccatataagtcaaatatgtatttaacaaagcaatatgtattcattcactttcaagatttgttttggtgtcaaaataacatgaaaaggtagatggagttgcttctgttgaattagctctgccaccaatatgtatcttcatacacgtttggaaatgtttcctgcagcattaggtatgacttgttctgagtactgcttccggtgctaaaatgaacaaagaatttgtacttaatggcatggactctggagaatctatgcgaatcaacctttctaccttaatatctccccaaaaatgtatagtgccttgtttttatgtacagtttatatacagaaaagtttgctctgcatttttgatgatggtttggaacattatctacaattttactctcaaatagtcaaaataaaaacatctcaatttctaataccggttgtaaacaaacagtacacatgtcattttgtgatataggactcccaaataaaagtatcagaataaacacaacaattaactggt

SEQ ID NO: 1522 - DNA, 404 bp, Artificial Sequence
  Description of Artificial sequences:primer
  misc_feature (1)..(404): 3' terminal sequence from clone image:754034. thrombopoietin (myeloproliferative leukemia virus oncogene ligand, megakaryocyte growth and development factor)(THPO) gene.
ttttttgctttttagggagcttttcggcgctcccatttattccttatacaggctcagttttgtctagtgtatagggacagcatttctgagagaaagcttattcatttctcaagagtaaagatctgttaagaatatgggatcagagtcccactgagaatgatagtaaaggggatgggggcgttggaaggccttgaatttgaagcaaaggaaattaccctttctctgttttctgactcaaggttagtctctccctctgttcaactgccaggccagcccaggcctttgcagagttatcacagaaaaagagcatgtagagaatcagtgagttgcaaatttctgcagaaaatagaccaaagagctagctgctctgatgagtattgctgatagcttaaaaaaatagcttc

SEQ ID NO: 1523 - DNA, 548 bp, Artificial Sequence
  Description of Artificial sequences:primer
  misc_feature (1)..(548): 5' terminal sequence from clone image:754034. thrombopoietin (myeloproliferative leukemia virus oncogene ligand, megakaryocyte growth and development factor)(THPO) gene.
caacctccagcctggatattctccttccccaacccatcctcctactggacagtatacgctcttccctcttccacccaccttgcccacccctgtggtccagctccaccccctgcttcctgacccttctgctccaacgcccacccctaccagccctcttctaaacacatcctacacccactcccagaatctgtctcaggaagggtaaggttctcagacactgccgacatcagcattgtctcgtgtacagctcccttccctgcagggcgcccctgggagacaactggacaagatttcctactttctcctgaaacccaaagccctggtaaaagggatacacaggactgaaaagggaatcatttttcactgtacattataaaccttcagaagctatttttttaagctatcagcaatactcatcagagcagctagctctttggtctattttctgcagaaatttgcaactcactgattctctacatgctctttttctgtgataactctgcaaaggcctgggctggcctggcagttgaacagagggagagactaac

SEQ ID NO: 1524 - DNA, 1795 bp, Artificial Sequence
  Description of Artificial sequences:primer
  misc_feature (1)..(1795): thrombopoietin (myeloproliferative leukemia virus oncogene ligand, megakaryocyte growth and development factor)(THPO) gene.
tcttcctacccatctgctccccagagggctgcctgctgtgcacttgggtcctggagcccttctccacccggatagattcctcacccttggcccgcctttgccccaccctactctgcccagaagtgcaagagcctaagccgcctccatggccccaggaaggattcaggggagaggccccaaacagggagccacgccagccagacaccccggccagaatggagctgactgaattgctcctcgtggtcatgcttctcctaactgcaaggctaacgctgtccagcccggctcctcctgcttgtgacctccgagtcctcagtaaactgcttcgtgactcccatgtccttcacagcagactgagccagtgcccagaggttcaccctttgcctacacctgtcctgctgcctgctgtggactttagcttgggagaatggaaaacccagatggaggagaccaaggcacaggacattctgggagcagtgacccttctgctggagggagtgatggcagcacggggacaactgggacccacttgcctctcatccctcctggggcagctttctggacaggtccgtctcctccttggggccctgcagagcctccttggaacccagcttcctccacagggcaggaccacagctcacaaggatcccaatgccatcttcctgagcttccaacacctgctccgaggaaaggtgcgtttcctgatgcttgtaggagggtccaccctctgcgtcaggcgggccccacccaccacagctgtccccagcagaacctctctagtcctcacactgaacgagctcccaaacaggacttctggattgttggagacaaacttcactgcctcagccagaactactggctctgggcttctgaagtggcagcagggattcagagccaagattcctggtctgctgaaccaaacctccaggtccctggaccaaatccccggatacctgaacaggatacacgaactcttgaatggaactcgtggactctttcctggaccctcacgcaggaccctaggagccccggacatttcctcaggaacatcagacacaggctccctgccacccaacctccagcctggatattctccttccccaacccatcctcctactggacagtatacgctcttccctcttccacccaccttgcccacccctgtggtccagctccaccccctgcttcctgacccttctgctccaacgcccacccctaccagccctcttctaaacacatcctacacccactcccagaatctgtctcaggaagggtaaggttctcagacactgccgacatcagcattgtctcatgtacagctcccttccctgcagggcgcccctgggagacaactggacaagatttcctactttctcctgaaacccaaagccctggtaaaagggatacacaggactgaaaagggaatcatttttcactgtacattataaaccttcagaagctatttttttaagctatcagcaatactcatcagagcagctagctctttggtctattttctgcagaaatttgcaactcactgattctctacatgctctttttctgtgataactctgcaaaggcctgggctggcctggcagttgaacagagggagagactaaccttgagtcagaaaacagagaaagggtaatttcctttgcttcaaattcaaggccttccaacgcccccatcccctttactatcattctcagtgggactctgatcccatattcttaacagatctttactcttgagaaatgaataagctttctctcagaaaaaaaaaaaaaaaaaaaaa

SEQ ID NO: 1525 - DNA, 376 bp, Artificial Sequence
  Description of Artificial sequences:primer
  misc_feature (1)..(376): 3' terminal sequence from clone image:754479. chromosome 1 open reading frame 29(C1ORF29) gene.
ttgcagtggagatggggtttcatcatgttgcccaggctagttttcctttctatatacagaaaaatttaaagtgaatgtgatgttggagagagtgggaaggaaaagtaatggcaagtatgcttgctcattaccaggcactgtgctaagctctgtgaatacacagataagtaaaatccacgctgtttctcaaagaactcacaatctgtttaagaagcagatgtctatacaataattttataactattattcaatgtgattagtactcacatagctctatatagagtgttatagaagaataaattagagaatatctcatttttcctccagtggtttaaaaagatgtcacagaaactgaattgtaaatggtacggaaata

SEQ ID NO: 1526 - DNA, 439 bp, Artificial Sequence
  Description of Artificial sequences:primer
  misc_feature (1)..(439): 5' terminal sequence from clone image:754479. chromosome 1 open reading frame 29(C1ORF29) gene.
ggagataagttgccttgattctgacatttggcccagcctgtactggtgtgccgcaatgagagtcaatctctattgacagcctgcttcagattttgcttttgttcgttttgccttctgtccttggaacagtcatatctcaagttcaaaggccaaaacctgagaagcggtgggctaagataggtcctactgcaaaccacccctccatatttccgtaccatttacaattcagtttctgtgacatctttttaaaccactggaggaaaaatgagatattctctaatttattcttctataacactctatatagagctatgtgagtactaatcacattgaataatagttataaaattattgtatagacatctgcttcttaaacagattgtgagttctttgagaaacagcgtggattttacttatctgtgtattcacagagcttagc

SEQ ID NO: 1527 - DNA, 2058 bp, Artificial Sequence
  Description of Artificial sequences:primer
  misc_feature (1)..(2058): chromosome 1 open reading frame 29(C1ORF29) gene.
gcacgaggaagccacagatctcttaagaactttctgtctccaaaccgtggctgctcgataaatcagacagaacagttaatcctcaatttaagcctgatctaacccctagaaacagatatagaacaatggaagtgacaacaagattgacatggaatgatgaaaatcatctgcgcaactgcttggaaatgtttctttgagtcttctctataagtctagtgttcatggaggtagcattgaagatatggttgaaagatgcagccgtcagggatgtactataacaatggcttacattgattacaatatgattgtagcctttatgcttggaaattatattaatttacgtgaaagttctacagagccaaatgattccctatggttttcacttcaaaagaaaaatgacaccactgaaatagaaactttactcttaaatacagcaccaaaaattattgatgagcaactggtgtgtcgtttatcgaaaacggatattttcattatatgtcgagataataaaatttatctagataaaatgataacaagaaacttgaaactaaggttttatggccaccgtcagtatttggaatgtgaagtttttcgagttgaaggaattaaggataacctagacgacataaagaggataattaaagccagagagcacagaaataggcttctagcagacatcagagactataggccctatgcagacttggtttcagaaattcgtattcttttggtgggtccagttgggtctggaaagtccagttttttcaattcagtcaagtctatttttcatggccatgtgactggccaagccgtagtggggtctgataccaccagcataaccgagcggtataggatatattctgttaaagatggaaaaaatggaaaatctctgccatttatgttgtgtgacactatggggctagatggggcagaaggagcaggactgtgcatggatgacattccccacatcttaaaaggttgtatgccagacagatatcagtttaattcccgtaaaccaattacacctgagcattctacttttatcacctctccatctctgaaggacaggattcactgtgtggcttatgtcttagacatcaactctattgacaatctctactctaaaatgttggcaaaagtgaagcaagttcacaaagaagtattaaactgtggtatagcatatgtggccttgcttactaaagtggatgattgcagtgaggttcttcaagacaactttttaaacatgagtagatctatgacttctcaaagccgggtcatgaatgtccataaaatgctaggcattcctatttccaatattttgatggttggaaattatgcttcagatttggaactggaccccatgaaggatattctcatcctctctgcactgaggcagatgctgcgggctgcagatgattttttagaagatttgcctcttgaggaaactggtgcaattgagagagcgttacagccctgcatttgagataagttgccttgattctgacatttggcccagcctgtactggtgtgccgcaatgagagtcaatctctattgacagcctgcttcagattttgcttttgttcgttttgccttctgtccttggaacagtcatatctcaagttcaaaggccaaaacctgagaagcggtgggctaagataggtcctactgcaaaccacccctccatatttccgtaccatttacaattcagtttctgtgacatctttttaaaccactggaggaaaaatgagatattctctaatttattcttctataacactctatatagagctatgtgagtactaatcacattgaataatagttataaaattattgtatagacatctgcttcttaaacagattgtgagttctttgagaaacagcgtggattttacttatctgtgtattcacagagcttagcacagtgcctggtaatgagcaagcatacttgccattacttttccttcccactctctccaacatcacattcactttaaatttttctgtatatagaaaggaaaactagcctgggcaacatgatgaaaccccatctccactgc

SEQ ID NO: 1528 - DNA, 185 bp, Artificial Sequence
  Description of Artificial sequences:primer
  misc_feature (1)..(185): 3' terminal sequence from clone image:755599. interferon induced transmembrane protein 1 (9-27)(IFITM1) gene.
cacaagcacgtgcactttattgaatgacactgtagacaggtgtgtgggtataaactgctgtatctaggggcaggaccaagggggcaggggcaacagcccagcgttgcagggccagcattgcacagtggagtgcaaaggttgcaggctatgggcggctactagtaaccccgtttttcctgtattat

SEQ ID NO: 1529 - DNA, 226 bp, Artificial Sequence
  Description of Artificial sequences:primer
  misc_feature (1)..(226): 5' terminal sequence from clone image:755599. interferon induced transmembrane protein 1 (9-27)(IFITM1) gene.
caagtctaccatattatgttacagataatacaggaaaaacggggtactagtagcgccatagcctgcaacctttgcactccatgtgcaatgctggcctgcacgctggggctgttgctgcccccttggtcctgcccctagatacagcagtttatacccacacacctgtctacagtgtcattcaataaagtgcacgtgcttgtgaaaaaaaaaaaaaaaaaaaaaaacc

SEQ ID NO: 1530 - DNA, 647 bp, Artificial Sequence
  Description of Artificial sequences:primer
  misc_feature (1)..(647): interferon induced transmembrane protein 1 (9-27)(IFITM1) gene.
gctcactgagcaccgtcccagcatccggacaccacagcggcccttcgctccacgcagaaaaccacacttctcataccttcactcaacacttccttccccaaagccagaagatgcacaaggaggaacatgaggtggctgtgctgggggcaccccccagcaccatccttccaaggtccaccgtgattaacatccacagcgagacctccgtgcccgaccatgtcgtctggtccctgttcaacaccctcttcttgaactggtgctgtctgggcttcatagcattcgcctactccgtaaagtctagggacaggaagatggttggcgacgtgaccggggcccaggcctatgcctccaccgccaagtgcctgaacatctgggccctgattctgggcatcctcatgaccattggattcatcctgttactggtattcggctctgtaacagtctaccatattatgttacagataatacaggaaaaacggggttactagtagccgcccatagcctgcaacctttgcactccactgtgcaatgctggccctgcacgctggggctgttgcccctgcccccttggtcctgcccctagatacagcagtttatacccacacacctgtctacagtgtcattcaataaagtgcacgtgcttgtga

SEQ ID NO: 1531 - DNA, 432 bp, Artificial Sequence
  Description of Artificial sequences:primer
  misc_feature (1)..(432): 3' terminal sequence from clone image:755663. retinoic acid receptor, beta(RARB) gene.
aaaataaatatattttattctttgccaggagactccatggaaaaaggtaaacagtatatgaacatagaaagcattgttaaacaaacaatctcaatgtacaaacagagccagtgaaagtacatcacagacttgctaatatatcaaaaaaaaaaaattccactagtgcttaaatgagaactaagaaactgacacttgtatctgttaaccactctaccacagctttcactctgcttcatagtgattgaacaaggtcaaaggaggcagattctatgcctgtttctttgggagttgttaatattaattagccccttggcatcaagaaggctggaaaaaaaaatcccaatatcaggcatgaatcaggaaggacactagagttacatggtccaggtggtagaccagcctgctaattatcccatgaaatttccctaatgg

SEQ ID NO: 1532 - DNA, 455 bp, Artificial Sequence
  Description of Artificial sequences:primer
  misc_feature (1)..(455): 5' terminal sequence from clone image:755663. retinoic acid receptor, beta(RARB) gene.
cactaggtcagtgcatctgcttaatctgtggagaccgccagaccgttgaggaaccgacaaaagtagataagctacaagaaccattgctggaacactaaaaatttatatcagaaaaagacgacccagcaagcctcacatgtttccaaagatcttaatgaaaatcacagatctccgtagcatcagtgctaaaggtgcagagcgtgtaattaccttgaaaatggaaattcctggatcaatgccacctctcattcaagaaatgctggagaattctgaaggacatgaacccttgaccccaagttcaagtgggaacacagcagacacagtcctagcatctcacccagctcagtggaaaacagtggggtcagtcagtcaccactcgtgcaataagacattttctagctacttcaaacattccccagtaccttcagttccaggatttaaaatgcaagaaaaaa

SEQ ID NO: 1533 - DNA, 472 bp, Artificial Sequence
  Description of Artificial sequences:primer
  misc_feature (1)..(472): 3' terminal sequence from clone image:768168. bone morphogenetic protein 6(BMP6) gene.
tttttgtagattataaatgtattatttaatcagtttagtatgaaattgccttcccagtacatgattgtgaaaaagacatttagaaaatattctaaaatttaatctgagcctcactttctacaagggaaatcatgatttccgttcataaacagcatgctcatccccctaacaccattcttataagctgggcaccctcattttattttcttcgttggttctaaccctgtggcgtggtatgctgtatagtaaaaaggcagagaaccactttactgaaaaggtactagagccggcagtccagaagttaatgtgctggtcaaagaaccgttctggtaaagaagaggtgagcattgccttcacgtgttacacggttacacaccccttgtagcctcacctcagtgtaatcagtctacttttggtactagcaaagagtacagcaaatggaggattgaggtgtagaaatggtatgttttgg

SEQ ID NO: 1534 - DNA, 502 bp, Artificial Sequence
  Description of Artificial sequences:primer
  misc_feature (1)..(502): 5' terminal sequence from clone image:768168. bone morphogenetic protein 6(BMP6) gene.
gtagcataaggtctggtaactgcagaaacataaccgtgaagctcttcctaccctcctcccccaaaaacccaccaaaattagttttagctgtagatcaagctatttggggtgtttgttagtaaatagggaaaataatctcaaaggagttaaatgtattcttggctaaaggatcagctggttcagtactgtctatcaaaggtagattttacagagaacagaaatcggggaagtggggggaacgcctctgttcagttcattcccagaagtccacaggacgcacagcccaggccacagccagggctccacggggcgcccttgtctcagtcattgctgttgtatgttcgtgctggagttttgttggtgtgaaaatacacttatttcagccaaaacataccatttctacacctcaatcctccatttgctgtactctttgctagtacaaaagtagactgattacactgaggtgaggctacaaggggtgtgtaccgtgtacacgtgaagg

SEQ ID NO: 1535 - DNA, 2943 bp, Artificial Sequence
  Description of Artificial sequences:primer
  misc_feature (1)..(2943): bone morphogenetic protein 6(BMP6) gene.
gcaactgggggcgccccggacgaccatgagagataaggactgagggccaggaaggggaagcgagcccgccgagaggtggcggggactgctcacgccaagggccacagcggccgcgctccggcctcgctccgccgctccacgcctcgcgggatccgcgggggcagcccggccgggcggggatgccggggctggggcggagggcgcagtggctgtgctggtggtgggggctgctgtgcagctgctgcgggcccccgccgctgcggccgcccttgcccgctgccgcggccgccgccgccggggggcagctgctgggggacggcgggagccccggccgcacggagcagccgccgccgtcgccgcagtcctcctcgggcttcctgtaccggcggctcaagacgcaggagaagcgggagatgcagaaggagatcttgtcggtgctggggctcccgcaccggccccggcccctgcacggcctccaacagccgcagcccccggcgctccggcagcaggaggagcagcagcagcagcagcagctgcctcgcggagagccccctcccgggcgactgaagtccgcgcccctcttcatgctggatctgtacaacgccctgtccgccgacaacgacgaggacggggcgtcggagggggagaggcagcagtcctggccccacgaagcagccagctcgtcccagcgtcggcagccgcccccgggcgccgcgcacccgctcaaccgcaagagccttctggcccccggatctggcagcggcggcgcgtccccactgaccagcgcgcaggacagcgccttcctcaacgacgcggacatggtcatgagctttgtgaacctggtggagtacgacaaggagttctcccctcgtcagcgacaccacaaagagttcaagttcaacttatcccagattcctgagggtgaggtggtgacggctgcagaattccgcatctacaaggactgtgttatggggagttttaaaaaccaaacttttcttatcagcatttatcaagtcttacaggagcatcagcacagagactctgacctgtttttgttggacacccgtgtagtatgggcctcagaagaaggctggctggaatttgacatcacggccactagcaatctgtgggttgtgactccacagcataacatggggcttcagctgagcgtggtgacaagggatggagtccacgtccacccccgagccgcaggcctggtgggcagagacggcccttacgataagcagcccttcatggtggctttcttcaaagtgagtgaggtccacgtgcgcaccaccaggtcagcctccagccggcgccgacaacagagtcgtaatcgctctacccagtcccaggacgtggcgcgggtctccagtgcttcagattacaacagcagtgaattgaaaacagcctgcaggaagcatgagctgtatgtgagtttccaagacctgggatggcaggactggatcattgcacccaagggctatgctgccaattactgtgatggagaatgctccttcccactcaacgcacacatgaatgcaaccaaccacgcgattgtgcagaccttggttcaccttatgaaccccgagtatgtccccaaaccgtgctgtgcgccaactaagctaaatgccatctcggttctttactttgatgacaactccaatgtcattctgaaaaaatacaggaatatggttgtaagagcttgtggatgccactaactcgaaaccagatgctggggacacacattctgccttggattcctagattacatctgccttaaaaaaacacggaagcacagttggaggtgggacgatgagactttgaaactatctcatgccagtgccttattacccaggaagattttaaaggacctcattaataatttgctcacttggtaaatgacgtgagtagttgttggtctgtagcaagctgagtttggatgtctgtagcataaggtctggtaactgcagaaacataaccgtgaagctcttcctaccctcctcccccaaaaacccaccaaaattagttttagctgtagatcaagctatttggggtgtttgttagtaaatagggaaaataatctcaaaggagttaaatgtattcttggctaaaggatcagctggttcagtactgtctatcaaaggtagattttacagagaacagaaatcggggaagtggggggaacgcctctgttcagttcattcccagaagtccacaggacgcacagcccaggccacagccagggctccacggggcgcccttgtctcagtcattgctgttgtatgttcgtgctggagttttgttggtgtgaaaatacacttatttcagccaaaacataccatttctacacctcaatcctccatttgctgtactctttgctagtaccaaaagtagactgattacactgaggtgaggctacaaggggtgtgtaaccgtgtaacacgtgaaggcagtgctcacctcttctttaccagaacggttctttgaccagcacattaacttctggactgccggctctagtaccttttcagtaaagtggttctctgcctttttactatacagcataccacgccacagggttagaaccaacgaagaaaataaaatgagggtgcccagcttataagaatggtgttagggggatgagcatgctgtttatgaacggaaatcatgatttccctgtagaaagtgaggctcagattaaattttagaatattttctaaatgtctttttcacaatcatgtgactgggaaggcaatttcatactaaactgattaaataatacatttataatctacaactgtttgcacttacagctttttttgtaaatataaactataatttattgtctattttatatctgttttgctgtggcgttggggggggggccgggcttttgggggggggggtttgtttggggggtgtcgtggtgtgggcgggcgg

SEQ ID NO: 1536 - DNA, 553 bp, Artificial Sequence
  Description of Artificial sequences:primer
  misc_feature (1)..(553): 3' terminal sequence from clone image:773319. ribosomal protein s6 kinase, 70kda, polypeptide 1(RPS6KB1) gene.
ttttttttttttaacaatgattcatttgcattttattatttcaccaagagaagaaacagaagttgtctggctttcttcacaccaaccaataatttcgcattttaaagtttgggatgtttttcataatgagctgaatcaaaaatctatttgaaaaatatatatttatataaaaaaaagattcaggttgtttgcacgtaaaacatcaattggtaagtttcttttgtctttgcttccattttgctggaaaaagtttgaccaagcttgcatgctaatttgtccttagttgcaagtattataggcaattttgtactttgcctaatgaaaggataacccttcttcaacacaatcagaactcaacagtgattcagaagcaacatcctacccttaatactgtcagtttcgagtcatcaacatgaaaatccttgataaggttgagaagatgtcgcgaggaatcaattaattgatgtgcctaagagttcagcaatactattttgctttaagtttttttttgcaccattgattgattttttaaaatccacgtttatttttcctg

SEQ ID NO: 1537 - DNA, 578 bp, Artificial Sequence
  Description of Artificial sequences:primer
  misc_feature (1)..(578): 5' terminal sequence from clone image:773319. ribosomal protein s6 kinase, 70kda, polypeptide 1(RPS6KB1) gene.
tgtggctccatctgtacttgaaagtgtgaaagaaaagttttcctttgaaccaaaaatccgatcacctcgaagatttattggcagcccacgaacacctgtcagcccagtcaaattttctcctggggatttctggggaagaggtgcttcggccagcacagcaaatcctcagacacctgtggaatacccaatggaaacaagtggcatagagcagatggatgtgacaatgagtggggaagcatcggcaccacttccaatacgacagccgaactctgggccatacaaaaaacaagcttttcccatgatctccaaacggccagagcacctgcgtatgaatctatgacagagcaatgcttttaatgaatttaaggcaaaaaaggtggagagggagatgtgtgagcatcctgcaaggtgaaacgactcaaaatgacagtttcagagagtcaatgtcattacatagaacacttcagacacaggaaaaattaacgtggattttaaaaaatcaatcaatggtggcaaaaaaaactttaagcaaaatagtattgctgaactcttaggcacatcaattaattgattcctcg

SEQ ID NO: 1538 - DNA, 2346 bp, Artificial Sequence
  Description of Artificial sequences:primer
  misc_feature (1)..(2346): ribosomal protein s6 kinase, 70kda, polypeptide 1(RPS6KB1) gene.
gcacgaggctgcggcgggtccgggcccatgaggcgacgaaggaggcgggacggcttttacccagccccggacttccgagacagggaagctgaggacatggcaggagtgtttgacatagacctggaccagccagaggacgcgggctctgaggatgagctggaggaggggggtcagttaaatgaaagcatggaccatgggggagttggaccatatgaacttggcatggaacattgtgagaaatttgaaatctcagaaactagtgtgaacagagggccagaaaaaatcagaccagaatgttttgagctacttcgggtacttggtaaagggggctatggaaaggtttttcaagtacgaaaagtaacaggagcaaatactgggaaaatatttgccatgaaggtgcttaaaaaggcaatgatagtaagaaatgctaaagatacagctcatacaaaagcagaacggaatattctggaggaagtaaagcatcccttcatcgtggatttaatttatgcctttcagactggtggaaaactctacctcatccttgagtatctcagtggaggagaactatttatgcagttagaaagagagggaatatttatggaagacactgcctgcttttacttggcagaaatctccatggctttggggcatttacatcaaaaggggatcatctacagagacctgaagccggagaatatcatgcttaatcaccaaggtcatgtgaaactaacagactttggactatgcaaagaatctattcatgatggaacagtcacacacacattttgtggaacaatagaatacatggcccctgaaatcttgatgagaagtggccacaatcgtgctgtggattggtggagtttgggagcattaatgtatgacatgctgactggagcacccccattcactggggagaatagaaagaaaacaattgacaaaatcctcaaatgtaaactcaatttgcctccctacctcacacaagaagccagagatctgcttaaaaagctgctgaaaagaaatgctgcttctcgtctgggagctggtcctggggacgctggagaagttcaagctcatccattctttagacacattaactgggaagaacttctggctcgaaaggtggagcccccctttaaacctctgttgcaatctgaagaggatgtaagtcagtttgattccaagtttacacgtcagacacctgtcgacagcccagatgactcaactctcagtgaaagtgccaatcaggtctttctgggttttacatatgtggctccatctgtacttgaaagtgtgaaagaaaagttttcctttgaaccaaaaatccgatcacctcgaagatttattggcagcccacgaacacctgtcagcccagtcaaattttctcctggggatttctggggaagaggtgcttcggccagcacagcaaatcctcagacacctgtggaatacccaatggaaacaagtggcatagagcagatggatgtgacaatgagtggggaagcatcggcaccacttccaatacgacagccgaactctgggccatacaaaaaacaagcttttcccatgatctccaaacggccagagcacctgcgtatgaatctatgacagagcaatgcttttaatgaatttaaggcaaaaaggtggagagggagatgtgtgagcatcctgcaaggtgaaacaagactcaaaatgacagtttcagagagtcaatgtcattacatagaacacttcggacacaggaaaaataaacgtggattttaaaaaatcaatcaatggtgcaaaaaaaaacttaaagcaaaatagtattgctgaactcttaggcacatcaattaattgattcctcgcgacatctttctcaaccttatcaaggattttcatgttgatgactcgaaactgacagtattaagggtaggatgttgctctgaatcactgtgagtctgatgtgtgaagaagggtatcctttcattaggcaagtacaaattgcctataatacttgcaactaaggacaaattagcatgcaagcttggtcaaacttttcccaggcaaaatgggaaggcaaagacaaaagaaacttaccaattgatgttttacgtgcaaacaacctgaatcttttttttatataaatatatatttttcaaatagatttttgattcagctcattatgaaaaacatcccaaactttaaaatgcgaaattattggttggtgtgaagaaagccagacaacttctgtttcttctcttggtgaaataataaaatgcaaatgaatcattgttaacacagctgtggctcgtttgagggattggggtggacctggggtttattttcagtaacccagctgcggagcct

SEQ ID NO: 1539 - DNA, 525 bp, Artificial Sequence
  Description of Artificial sequences:primer
  misc_feature (1)..(525): 3' terminal sequence from clone image:782601. hypothetical protein r30953_1(R30953_1) gene.
  misc_feature (440)..(440): n is a, c, g, or t
gcggccgccagcctctgggaccggcaggccctgggtgacgcccaacaccagggcggtcttgaggacttgctcttgaagcatggccttcttcttctgcaaggcctccagcgagatgtcggggagcgaacgaggccagcgtggcgccggttggagggcaggtcgtgctcccaggtggacaccagcgtgggaaagtcgtagcgggccggcgagaggttggacaccaggaagatgcgggggtcagccacgccggcctcccgcagccgctcggcacagtggtctcggatctcctgcaggacagcggcctctctgaagcccgacggccgctgggtgcgcgtggccgccaggtcctcgtccaccttggtgcgcacaaagtagaacttcttgccctggcacaggatctcagcggccaggcgggtctcgacggccccgcagcggcgggngggagaccagcaggaagaagtcatagcggctgaagtctacctgctttaggtacttgtcagccgggcagcctggagagccggctcc

SEQ ID NO: 1540 - DNA, 247 bp, Artificial Sequence
  Description of Artificial sequences:primer
  misc_feature (1)..(247): 5' terminal sequence from clone image:782601. hypothetical protein r30953_1(R30953_1) gene.
cgtcgtcgagacccgcctggccgctgagatcctgtgccagggcaagaagttctactttgtgcgcaccaatgtggacgaggacctggcggccaccgcagcccagcggccgtcgggcttcacagaggccgctgtcctgcatgagatccgagaccactgtgcccaccggctgcgcgagaccggcgtggctgacccccgcatcttcctggtgtccaaccaatcgccggcccgctacgactttcccacgctg

SEQ ID NO: 1541 - DNA, 1392 bp, Artificial Sequence
  Description of Artificial sequences:primer
  misc_feature (1)..(1392): hypothetical protein r30953_1(R30953_1) gene.
atggctacttcaaagttgcccgtggtgcctggggaggaggaaaacaccatccttatggccaaggaaaggctggaggccctgcgcacagcctttgagtcgggtgacctcccccaggccgcctctcacctccaggagctgctggcctccacggaaagcatccgcctggaggtgggcgtcacgggcgagtcgggcgcgggcaagtcctccctcatcaatgccctgcgtggcctggaggccgaggaccctggcgcggctctcacgggcgtcatggagaccacgatgcaaccgtcgccctatccacacccacagttccctgacgtgaccctctgggacctgccaggagccggctctccaggctgcccggctgacaagtacctaaagcaggtagacttcagccgctatgacttcttcctgctggtctccccccgccgctgcggggccgtcgagacccgcctggccgctgagatcctgtgccagggcaagaagttctactttgtgcgcaccaaggtggacgaggacctggcggccacgcgcacccagcggccgtcgggcttcagagaggccgctgtcctgcaggagatccgagaccactgtgccgagcggctgcgggaggccggcgtggctgaccctcgcatcttcctggtgtccaacctctcgccggcccgctacgactttcccacgctggtgtccacctgggagcacgacctgccctcccaccggcgccacgctggcctgctgtcgctccccgacatctcgctggaggccttgcagaagaagaaggccatgcttcaagagcaagtcctcaagaccgccctggtgttgggcgtcatccaggccctgccggtcccagggctggcggccgcctacgatgatgcgttgctcatccactcactgcgtggctaccaccgcagctttggtctggacgacgactcgctggccaagctggccgagcaggtgggcaaacaggcaggtgacctgcgctcggtcatccgctccccactggccaacgaggtctcgcctgagactgtcctgcggctctattcccagtcgtccgacggcgccatgcgggtggcccgcgcctttgagaggggcatccctgtgtttgggacgctggtggctggcggcatcagctttggcgctgtctacaccatgctccagggctgcctcaacgagatggctgaggacgcccagcgtgtccgcatcaaggccctggaggatgacgagccgcagccggaggtcagcttggaagtggccagtgacaatggcgtggaaaaggggggctccggggagggaggtggggaggaagccccactctcaacctgcaggaagctcggcctccttcttaagtacattctggacagctggaagaaacacgactcagaagagaaataa

SEQ ID NO: 1542 - DNA, 399 bp, Artificial Sequence
  Description of Artificial sequences:primer
  misc_feature (1)..(399): 3' terminal sequence from clone image:785886. ring finger protein 13(RNF13) gene.
actggatcttaaagtggaaaacatgtttattaacattcaaactcccctcatacaaggccatataaaaatccttagcattttgattatacattagtctacactttctacatagttacaatgatgtataatttagcttttcataatacagtgtttcaatacatcattagttctgttaaacataagtcacttactttcaaatccaatacttgaacagtttcctctgtacatagtttagcagggctaattagcataagatgctatttattaagaggtatatgatctgagtattaacagttgctgaagtttggtatttttatgcagcattttctttttgctttgataacactacagaacccttaaggacactgaaaattagtaagtaaagttcagaaacattag

SEQ ID NO: 1543 - DNA, 472 bp, Artificial Sequence
  Description of Artificial sequences:primer
  misc_feature (1)..(472): 5' terminal sequence from clone image:785886. ring finger protein 13(RNF13) gene.
cttatcactgcaagtgtgtagacccttggctaactaaaaccaaaaaaacctgtccagtgtgcaagcaaaaagttgttccttctcaaggcgattcagactctgacacagacagtagtcaagaagaaaatgaagtgacagaacatacccctttactgagacctttagcttctgtcagtgcccagtcatttggggctttatcggaatcccgctcacatcagaacatgacagaatcttcagactatgaggaagacgacaatgaagatactgacagtagtgatgcagaaaatgaaattaatgaacatgatgtcgtggtccagttgcagcctaatggtgaacgggattacaacatagcaaatactgtttgactttcagaagatgattggtttatttccctttaaaatgattaggtatatactgtaatttgattttttgctcccttcaaagatttctgtagaaataacttattttttag

SEQ ID NO: 1544 - DNA, 2455 bp, Artificial Sequence
  Description of Artificial sequences:primer
  misc_feature (1)..(2455): ring finger protein 13(RNF13) gene.
ggggggcctaggtgttgtcgtccctgctagtactccgggctgtgggggtcggtgcggatattcagtcatgaaatcagggtagggacttctcccgcagcgacgcggctggcaagactgtttgtgttgcgggggccggacttcaagagagaaagagagagtgggcagacatcgaagccaaacagcagtatcccggaagcactcatgcaactttggtggcggccactcagttttctctgccagtgtctggtgattttacaacgagatgctgctctccatagggatgctcatgctgtcagccacacaagtctacaccatcttgactgtccagctctttgcattcttaaacctactgcctgtagaagcagacattttagcatataactttgaaaatgcatctcagacatttgatgacctccctgcaagatttggttatagacttccagctgaaggtttaaagggttttttgattaactcaaaaccagagaatgcctgtgaacccatagtgcctccaccagtaaaagacaattcatctggcactttcatcgtgttaattagaagacttgattgtaattttgatataaaggttttaaatgcacagagagcaggatacaaggcagccatagttcacaatgttgattctgatgacctcattagcatgggatccaacgacattgaggtactaaagaaaattgacattccatctgtctttattggtgaatcatcagctaattctctgaaagatgaattcacatatgaaaaagggggccaccttatcttagttccagaatttagtcttcctttggaatactacctaattcccttccttatcatagtgggcatctgtctcatcttgatagtcattttcatgatcacaaaatttgtccaggatagacatagagctagaagaaacagacttcgtaaagatcaacttaagaaacttcctgtacataaattcaagaaaggagatgagtatgatgtatgtgccatttgtttggatgagtatgaagatggagacaaactcagaatccttccctgttcccatgcttatcattgcaagtgtgtagacccttggctaactaaaaccaaaaaaacctgtccagtgtgcaagcaaaaagttgttccttctcaaggcgattcagactctgacacagacagtagtcaagaagaaaatgaagtgacagaacatacccctttactgagacctttagcttctgtcagtgcccagtcatttggggctttatcggaatcccgctcacatcagaacatgacagaatcttcagactatgaggaagacgacaatgaagatactgacagtagtgatgcagaaaatgaaattaatgaacatgatgtcgtggtccagttgcagcctaatggtgaacgggattacaacatagcaaatactgtttgactttcagaagatgattggtttatttccctttaaaatgattaggtatatactgtaatttgattttttgctcccttcaaagatttctgtagaaataacttattttttagtattctacagtttaatcaaattactgaaacaggacttttgatctggtatttatctgccaagaatatacttcattcactaataatagactggtgctgtaactcaagcatcaattcagctcttcttttggaatgaaagtatagccaaaacataaaaaaaaaaaaaatcctcagtatagcttgcaattaagacctagatcacagtatttaagtgttttgcgttttatacatgaggtcagtgctacagccacctagcatgaactaacccagcttccacctccataaagttacctagagttgttgagttggaatatgttctggcatttacctgacctgccaatcattagggagaggcaacaaggtaattcagcctttcctcctatcagcacaaagaaactcaaagctgttttttccctttctgttccaaagcagtcttatcctgacaggagcggtctatactagtgcagatttcaacacttttttttaacgttttaattactatagtgttatgtagagatttgattgagcagctaatgtttctgaactttacttactaattttcagtgtccttaagggttctgtagtgttatcaaagcaaaaagaaaatgctgcataaaaataccaaacttcagcaactgttaatactcagatcatatacctcttaataaatagcatcttatgctaattagccctgctaaactatgtacagaggaaactgttcaagtattggatttgaaagtaagtgacttatgtttaacagaactaatgatgtattgaaacactgtattatgaaaagctaaattatacatcattgtaactatgtagaaagtgtagactaatgtataatcaaaatgctaaggatttttatatggccttgtatgaggggagtttgaatgttaataaacatgttttccaaaaaaaaaaaaaaaaaaaaaaaaaaaaa

SEQ ID NO: 1545 - DNA, 520 bp, Artificial Sequence
  Description of Artificial sequences:primer
  misc_feature (1)..(520): 3' terminal sequence from clone image:786662. cgi-128 protein(CGI-128) gene.
tttttttaactgaatataaattaactttattacaaaaagcaaaatgttagtttctcattgtgagtgattcaagaaaacaacggtaacagccctggcaggagctgggaccaggataccagtatgcaggctgaggggtcaaaggccaggctcaggagcgggctgacaggcactgattcacaacctccaagaggtgggtgttctccagggcagctgccacccgctccttatctgcaagttgcttgttcactgcatgctctgaggcatgggtccccggagtaatgtgcacgtccatcttgaaacgctgaggaagggagcgcagaagtttgaccttgatggacagaccaataagggtggccatgctgcagtgcggaatggttggtgtgaaagccacagccactgtactctcggggtcgctaacctgaacccgcacctgctctactacgttcaactcctctagcgtcagtggatgctccgggtcattgatggagcgaatcagatcgaagatctcgcgtgcgtcgat

SEQ ID NO: 1546 - DNA, 229 bp, Artificial Sequence
  Description of Artificial sequences:primer
  misc_feature (1)..(229): 5' terminal sequence from clone image:786662. cgi-128 protein(CGI-128) gene.
cggcacgaggttccgcgatggtaggcggcggcggggtcggcggcggctcctggagaatgccaaccccctcatctaccagcgctctggggagcggcctgtgacggcagcgaggaggacgagcaggttcccgacagcatcgacgcacgcgagatcttcgatctgattcgctccatcaatgaccccggagcatccactgacgctagaggagttgaacgtagtagagcaggtg

SEQ ID NO: 1547 - DNA, 670 bp, Artificial Sequence
  Description of Artificial sequences:primer
  misc_feature (1)..(670): cgi-128 protein(CGI-128) gene.
cgcacgctgctaggatcagcggtggtggttccgcgatggtaggcggcggcggggtcggcggcggcctcctggagaatgccaaccccctcatctaccagcgctctggggagcggcctgtgacggcaggcgaggaggacgagcaggttcccgacagcatcgacgcacgcgagatcttcgatctgattcgctccatcaatgacccggagcatccactgacgctagaggagttgaacgtagtagagcaggtgcgggttcaggttagcgaccccgagagtacagtggctgtggctttcacaccaaccattccgcactgcagcatggccacccttattggtctgtccatcaaggtcaagcttctgcgctcccttcctcagcgtttcaagatggacgtgcacattactccggggacccatgcctcagagcatgcagtgaacaagcaacttgcagataaggagcgggtggcagctgccctggagaacacccacctcttggaggttgtgaatcagtgcctgtcagcccgctcctgagcctggcctttgacccctcagcctgcatactggtatcctggtcccagctcctgccagggctgttaccgttgttttcttgaatcactcacaatgagaaactaacattttgctttttgtaataaagttaatttatattcagtaaa

SEQ ID NO: 1548 - DNA, 459 bp, Artificial Sequence
  Description of Artificial sequences:primer
  misc_feature (1)..(459): 3' terminal sequence from clone image:78879. similar to complement component 3.
  misc_feature (42)..(42): n is a, c, g, or t
  misc_feature (373)..(373): n is a, c, g, or t
  misc_feature (395)..(395): n is a, c, g, or t
  misc_feature (425)..(425): n is a, c, g, or t
  misc_feature (430)..(430): n is a, c, g, or t
  misc_feature (449)..(449): n is a, c, g, or t
gctctttatttggggttaaacccatgtggcccagagctgccntgatgacacctccctgaaagcagaagaggctcaggactggcagccgtgggtgcgcatatattccaaaaattcctccagttggtcccgcaattctttcttgctggcatctccatctgctggccaaaggatgaggaacgtctccttgcccagaacatagctgtaatcagatttgattctccacaggtctgacgtctggcccatgatgaggtacgattcctgttcttgcaaccccagggagtcatggcaagtggcatgggagacgaatttcttcatggccaggggtttggcagggtccgtaccactcttaatgatgtcttcgagctgcgtgttntaatagacgtaagggttgggangcagagacctccacaagattcccagctttntcttntacacaaaatccacgcctncctcacatgc

SEQ ID NO: 1549 - DNA, 390 bp, Artificial Sequence
  Description of Artificial sequences:primer
  misc_feature (1)..(390): 3' terminal sequence from clone image:79598. cadherin 1, type 1, e-cadherin (epithelial)(CDH1) gene.
  misc_feature (7)..(7): n is a, c, g, or t
  misc_feature (62)..(62): n is a, c, g, or t
ttaatanaaatttataaaaatgcatctttgagaatacttttctcagcttgaattgttttccnttttccacccccaaagaaaatacacaattatcagcacccacacatgtatacactcaaaactacagtgacattctctacacagaactatattcgatatagcttgaactgccgaaaaatcaagacaattccaaaaagtgattgcagggttgatttttttctccaaaacacttgagaaacagtaaagctatttcaacaaaagtcttttctttgattgtcaaaagttgaaattcacatttaaataaaaagagatcccaaatcaaggatcctcactaccccctacccctcaacttaaccccctttggggcccacattttcttcttggctccta

SEQ ID NO: 1550 - DNA, 373 bp, Artificial Sequence
  Description of Artificial sequences:primer
  misc_feature (1)..(373): 5' terminal sequence from clone image:79598. cadherin 1, type 1, e-cadherin (epithelial)(CDH1) gene.
  misc_feature (315)..(315): n is a, c, g, or t
  misc_feature (329)..(329): n is a, c, g, or t
atgattgaggtgggtctacctcatctctgaaaattctggaaggaatggaggagtctcaacatgtgtttctgacacaagatccgtggtttgtactcaaagcccagaatccccaagtgcctgcttttgatgatgtctacagaaaatgctggctgagctgaacacatttgcccaattccagggtgtgcacagaaaaccgagaatattcaaaattccaaatttttttcttagggagcaagaagaaaatgtgggccctaaagggggttagttgaggggtaggggggtagttgagggtctttgatttgggactcttttttnttttaaatgtgganttttcaactttttgacaatccaaagaaaagacttttgtttggaa

SEQ ID NO: 1551 - DNA, 4828 bp, Artificial Sequence
  Description of Artificial sequences:primer
  misc_feature (1)..(4828): cadherin 1, type 1, e-cadherin (epithelial)(CDH1) gene.
agtggcgtcggaactgcaaagcacctgtgagcttgcggaagtcagttcagactccagcccgctccagcccggcccgacccgaccgcacccggcgcctgccctcgctcggcgtccccggccagccatgggcccttggagccgcagcctctcggcgctgctgctgctgctgcaggtctcctcttggctctgccaggagccggagccctgccaccctggctttgacgccgagagctacacgttcacggtgccccggcgccacctggagagaggccgcgtcctgggcagagtgaattttgaagattgcaccggtcgacaaaggacagcctatttttccctcgacacccgattcaaagtgggcacagatggtgtgattacagtcaaaaggcctctacggtttcataacccacagatccatttcttggtctacgcctgggactccacctacagaaagttttccaccaaagtcacgctgaatacagtggggcaccaccaccgccccccgccccatcaggcctccgtttctggaatccaagcagaattgctcacatttcccaactcctctcctggcctcagaagacagaagagagactgggttattcctcccatcagctgcccagaaaatgaaaaaggcccatttcctaaaaacctggttcagatcaaatccaacaaagacaaagaaggcaaggttttctacagcatcactggccaaggagctgacacaccccctgttggtgtctttattattgaaagagaaacaggatggctgaaggtgacagagcctctggatagagaacgcattgccacatacactctcttctctcacgctgtgtcatccaacgggaatgcagttgaggatccaatggagattttgatcacggtaaccgatcagaatgacaacaagcccgaattcacccaggaggtctttaaggggtctgtcatggaaggtgctcttccaggaacctctgtgatggaggtcacagccacagacgcggacgatgatgtgaacacctacaatgccgccatcgcttacaccatcctcagccaagatcctgagctccctgacaaaaatatgttcaccattaacaggaacacaggagtcatcagtgtggtcaccactgggctggaccgagagagtttccctacgtataccctggtggttcaagctgctgaccttcaaggtgaggggttaagcacaacagcaacagctgtgatcacagtcactgacaccaacgataatcctccgatcttcaatcccaccacgtacaagggtcaggtgcctgagaacgaggctaacgtcgtaatcaccacactgaaagtgactgatgctgatgcccccaataccccagcgtgggaggctgtatacaccatattgaatgatgatggtggacaatttgtcgtcaccacaaatccagtgaacaacgatggcattttgaaaacagcaaagggcttggattttgaggccaagcagcagtacattctacacgtagcagtgacgaatgtggtaccttttgaggtctctctcaccacctccacagccaccgtcaccgtggatgtgctggatgtgaatgaagcccccatctttgtgcctcctgaaaagagagtggaagtgtccgaggactttggcgtgggccaggaaatcacatcctacactgcccaggagccagacacatttatggaacagaaaataacatatcggatttggagagacactgccaactggctggagattaatccggacactggtgccatttccactcgggctgagctggacagggaggattttgagcacgtgaagaacagcacgtacacagccctaatcatagctacagacaatggttctccagttgctactggaacagggacacttctgctgatcctgtctgatgtgaatgacaacgcccccataccagaacctcgaactatattcttctgtgagaggaatccaaagcctcaggtcataaacatcattgatgcagaccttcctcccaatacatctcccttcacagcagaactaacacacggggcgagtgccaactggaccattcagtacaacgacccaacccaagaatctatcattttgaagccaaagatggccttagaggtgggtgactacaaaatcaatctcaagctcatggataaccagaataaagaccaagtgaccaccttagaggtcagcgtgtgtgactgtgaaggggccgccggcgtctgtaggaaggcacagcctgtcgaagcaggattgcaaattcctgccattctggggattcttggaggaattcttgctttgctaattctgattctgctgctcttgctgtttcttcggaggagagcggtggtcaaagagcccttactgcccccagaggatgacacccgggacaacgtttattactatgatgaagaaggaggcggagaagaggaccaggactttgacttgagccagctgcacaggggcctggacgctcggcctgaagtgactcgtaacgacgttgcaccaaccctcatgagtgtcccccggtatcttccccgccctgccaatcccgatgaaattggaaattttattgatgaaaatctgaaagcggctgatactgaccccacagccccgccttatgattctctgctcgtgtttgactatgaaggaagcggttccgaagctgctagtctgagctccctgaactcctcagagtcagacaaagaccaggactatgactacttgaacgaatggggcaatcgcttcaagaagctggctgacatgtacggaggcggcgaggacgactaggggactcgagagaggcgggccccagacccatgtgctgggaaatgcagaaatcacgttgctggtggtttttcagctcccttcccttgagatgagtttctggggaaaaaaaagagactggttagtgatgcagttagtatagctttatactctctccactttatagctctaataagtttgtgttagaaaagtttcgacttatttcttaaagcttttttttttttcccatcactctttacatggtggtgatgtccaaaagatacccaaattttaatattccagaagaacaactttagcatcagaaggttcacccagcaccttgcagattttcttaaggaattttgtctcacttttaaaaagaaggggagaagtcagctactctagttctgttgttttgtgtatataattttttaaaaaaaatttgtgtgcttctgctcattactacactggtgtgtccctctgcctttttttttttttttaagacagggtctcattctatcggccaggctggagtgcagtggtgcaatcacagctcactgcagccttgtcctcccaggctcaagctatccttgcacctcagcctcccaagtagctgggaccacaggcatgcaccactacgcatgactaattttttaaatatttgagacggggtctccctgtgttacccaggctggtctcaaactcctgggctcaagtgatcctcccatcttggcctcccagagtattgggattacagacatgagccactgcacctgcccagctccccaactccctgccattttttaagagacagtttcgctccatcgcccaggcctgggatgcagtgatgtgatcatagctcactgtaacctcaaactctggggctcaagcagttctcccaccagcctcctttttatttttttgtacagatggggtcttgctatgttgcccaagctggtcttaaactcctggcctcaagcaatccttctgccttggccccccaaagtgctgggattgtgggcatgagctgctgtgcccagcctccatgttttaatatcaactctcactcctgaattcagttgctttgcccaagataggagttctctgatgcagaaattattgggctcttttagggtaagaagtttgtgtctttgtctggccacatcttgactaggtattgtctactctgaagacctttaatggcttccctctttcatctcctgagtatgtaacttgcaatgggcagctatccagtgacttgttctgagtaagtgtgttcattaatgtttatttagctctgaagcaagagtgatatactccaggacttagaatagtgcctaaagtgctgcagccaaagacagagcggaactatgaaaagtgggcttggagatggcaggagagcttgtcattgagcctggcaatttagcaaactgatgctgaggatgattgaggtgggtctacctcatctctgaaaattctggaaggaatggaggagtctcaacatgtgtttctgacacaagatccgtggtttgtactcaaagcccagaatccccaagtgcctgcttttgatgatgtctacagaaaatgctggctgagctgaacacatttgcccaattccaggtgtgcacagaaaaccgagaatattcaaaattccaaattttttcttaggagcaagaagaaaatgtggccctaaagggggttagttgaggggtagggggtagtgaggatcttgatttggatctctttttatttaaatgtgaatttcaacttttgacaatcaaagaaaagacttttgttgaaatagctttactgtttctcaagtgttttggagaaaaaaatcaaccctgcaatcactttttggaattgtcttgatttttcggcagttcaagctatatcgaatatagttctgtgtagagaatgtcactgtagttttgagtgtatacatgtgtgggtgctgataattgtgtattttctttgggggtggaaaaggaaaacaattcaagctgagaaaagtattctcaaagatgcatttttataaattttattaaacaattttgttaaaccataaaaaaaaaaaaa

SEQ ID NO: 1552 - DNA, 451 bp, Artificial Sequence
  Description of Artificial sequences:primer
  misc_feature (1)..(451): 3' terminal sequence from clone image:796475. four and a half lim domains 3(FHL3) gene.
ttttcctcacaccgctttattgcagaatctggaagggggatgagccaatctcacccctctgcccatctatggcgaaaatggagctgaaataaaatgagaagacactcggtggcgacctgctgggcagcaccctgtaccctagggccccttatcagtgggctcctgatctgctgcccccacagcctcaaccgcggggatggggtggggcaggtcaagcctgagaacagtccactttcaaggacttcccaggcacccataggagacctgaaacctataaagagaagtctagatttaagggggcctaagtcccagagtccaggtttggagggctcgggtctagagccctgatttggggagaggactcagtctgggaacccagactgcaggggagagggtgaattctggagtccaggtgtggggagggggcttgactcatggaggctctgtaaga

SEQ ID NO: 1553 - DNA, 456 bp, Artificial Sequence
  Description of Artificial sequences:primer
  misc_feature (1)..(456): 5' terminal sequence from clone image:796475. four and a half lim domains 3(FHL3) gene.
gaacagccactggctcccgttcttttgtgcccgacaaggtgctcactactgcgtgccctgctatgagaacaagtttgctcctcgctgcgcccgctgcagcaagacgctgacacagggtggagtgacataccgtgatcagccatggcatcgagaatgtctggtctgtaccggatgccagcgctcactagccgatgaacccttcacctgccaggacagtgagctgctctgcaatgactgctactgcagtgcgttttcctcgcagtgctccgcttgtggggagactgtcatgcctgggtcccggaagctggaatatggaggccagacatggcatgagcactgcttcctgttttggagaactctttgcacctaagtgagcagctgcaacgccccatcgtaggactcggtggaggcaagtatgtgtcctttgaagaccgacactggcaccacaactgcttc

SEQ ID NO: 1554 - DNA, 1516 bp, Artificial Sequence
  Description of Artificial sequences:primer
  misc_feature (1)..(1516): four and a half lim domains 3(FHL3) gene.
  misc_feature (13)..(13): n is a, c, g, t or u
  misc_feature (1447)..(1447): n is a, c, g, t or u
ggcacgagcccgnttcgagggttctctccccttgccaccatgagcgagtcatttgactgtgcaaaatgcaacgagtccctgtatggacgcaagtacatccagacagacagcggcccctactgtgtgccctgctatgacaatacctttgccaacacctgtgctgagtgccagcagcttatcgggcatgactcgagggagctgttctatgaagaccgccatttccacgagggctgcttccgctgctgccgctgccagcgctcactagccgatgaacccttcacccgccaggacagtgagctgctctgcaatgactgctactgcagtgcgttttcctcgcagtgctccgcttgtggggagactgtcatgcctgggtcccggaagctggaatatggaggccaaacatggcatgagcactgcttcctgtgcattggctgtgaacagccactgggctcccgtccttttgtgcccgacaagggtgctcactactgcgtgccctgctatgaaaacaattttgctcctcgctgcgcccgctgcaccaaaacgcttacacagggtggattgacataccgtgatctgccgtggcatccaaaatgtctggtctgtaccggatgccagacgcccttggcagggcagcagttcacctcccgggatgaagatccctactgtgtggcctgttttggagaactctttgcacctaagtgcagcagctgcaagcgccccatcgtaggactcggtggaggcaagtatgtgtcctttgaagaccgacactggcaccacaactgcttcacctgcgaccgctgctctaactccctggtgggccagggcttcgtaccggatggagaccaagtgctctgccagggctgtagccaggcagggccctaagccagggctcctggaccaaggctttcctataccacgggcccaggactgtggctccttttctaaaccacctctgggactcagctccccccgccaaaaaaaatgggtctccttctgggctccaggattgtctccccactccagcatccccaaactggtactccctgacccaggcccccaatcctgggctcttacagagcatccatgagtcaagccccctccccacacctggactccagaattcaccctctcccctgcagtctgggttcccagactgagtcctctccccaaatcagggctctagacccgagccctccaaacctggactctgggacttaggcccccttaaatctagacttctctttataggtttcaggtctcctatgggtgcctgggaagtccttgaaagtggactgttctcaggcttgacctgccccaccccatccccgcggttgaggctgtgggggcagcagatcaggagcccactgataaggggccctagggtacagggtgctgcccagcaggtcgccaccgagtgtcttctcattttatttcagctccattttgnccatagatgggcagaggggtgagattggctcatcccccttccagattctgcaataaagcggtgtgagga

SEQ ID NO: 1555 - DNA, 321 bp, Artificial Sequence
  Description of Artificial sequences:primer
  misc_feature (1)..(321): 3' terminal sequence from clone image:79829. homo sapiens transcribed sequences.
  misc_feature (253)..(253): n is a, c, g, or t
  misc_feature (266)..(266): n is a, c, g, or t
agagcaatggtgcgatctcaataagcagctcattttgattacgggtatacatgaagtaaaattcatgaagtaaaattcattataccaaaaagcctcccacagaactttcatgcaccctgagctatgtgaactgaaaagtaacagtgggatagcaagaaccagcttacaaaataaattcctatcgagtgtttttcacagaaggatgataattttaggttgcttacatcatatatttcccaatctttaatgaggnaaaacctactctngatgatcttgatgtttatttgaggtattctgaggaaaggaattgcctgatggggg

SEQ ID NO: 1556 - DNA, 373 bp, Artificial Sequence
  Description of Artificial sequences:primer
  misc_feature (1)..(373): 3' terminal sequence from clone image:80384. vav 1 oncogene(VAV1) gene.
  misc_feature (66)..(66): n is a, c, g, or t
  misc_feature (106)..(106): n is a, c, g, or t
  misc_feature (121)..(121): n is a, c, g, or t
  misc_feature (191)..(191): n is a, c, g, or t
  misc_feature (195)..(195): n is a, c, g, or t
  misc_feature (220)..(220): n is a, c, g, or t
  misc_feature (236)..(236): n is a, c, g, or t
  misc_feature (285)..(285): n is a, c, g, or t
  misc_feature (312)..(312): n is a, c, g, or t
  misc_feature (333)..(333): n is a, c, g, or t
  misc_feature (343)..(343): n is a, c, g, or t
  misc_feature (366)..(366): n is a, c, g, or t
tccttttattaaatgtaacccccttgagccccgtctgcttgagggacccaagaggaaatcggggtnttataaattaaccatgtcagggcacatcccgggagcaccnccagctggacgctgnctcctccagtccatcccaaagtctccacccgccggagctgtcacagccctggtccgctgcctgcccacgncggntcagagctggagtttctcgtctctntgccaaggaccagggntcagcagtattcagaataatcttcctccacgtagttggcagggaaccanccaacccggccatagatctcccctcgncaccagccttgctgtcccttnttgttaaggntcttgatgatgtcaccctccttnagcgaca

SEQ ID NO: 1557 - DNA, 321 bp, Artificial Sequence
  Description of Artificial sequences:primer
  misc_feature (1)..(321): 5' terminal sequence from clone image:80384. vav 1 oncogene(VAV1) gene.
  misc_feature (1)..(2): n is a, c, g, or t
  misc_feature (4)..(4): n is a, c, g, or t
  misc_feature (8)..(8): n is a, c, g, or t
  misc_feature (68)..(68): n is a, c, g, or t
  misc_feature (74)..(74): n is a, c, g, or t
  misc_feature (77)..(77): n is a, c, g, or t
  misc_feature (272)..(272): n is a, c, g, or t
  misc_feature (297)..(297): n is a, c, g, or t
nngntggntggaggttttaccagcagaactctctaaaggattgcttcaagtctctggacaccaccttncagttnccnttcaaggagcctgaaaagagaaccatcagcaggccagcagtgggaagcacaaagtattttggcacagcaaagcccgctatgacttctgcgcccgagaccgatcagagctgtcgctcaaggagggtgacatcatcaagatccttaacaagaagggacagcaaggctggtggcgaggggagatctatggccgggttngctggttccctgccaactacgtggnatggaagatttattctgaatactt

SEQ ID NO: 1558 - DNA, 2888 bp, Artificial Sequence
  Description of Artificial sequences:primer
  misc_feature (1)..(2888): vav 1 oncogene(VAV1) gene.
actagctgtcgctccacaggcgagcagggcaggcgtgcgggcgggtgggtggtggaggctgcgagggtgcacggccggccctgggcaggcggtagccatggagctgtggcgccaatgcacccactggctcatccagtgccgggtgctgccgcccagccaccgcgtgacctgggatggggctcaggtgtgtgaactggcccaggccctccgggatggtgtccttctgtgtcagctgcttaacaacctgctaccccatgccatcaacctgcgtgaggtcaacctgcgcccccagatgtcccagttcctgtgccttaagaacattagaaccttcctgtccacctgctgtgagaagttcggcctcaagcggagcgagctcttcgaagcctttgacctcttcgatgtgcaggattttggcaaggtcatctacaccctgtctgctctgtcctggaccccgatcgcccagaacagggggatcatgcccttccccaccgaggaggagagtgtaggtgatgaagacatctacagtggcctgtccgaccagatcgacgacacggtggaggaggatgaggacctgtatgactgcgtggagaatgaggaggcggaaggcgacgagatctatgaggacctcatgcgctcggagcccgtgtccatgccgcccaagatgacagagtatgacaagcgctgctgctgcctgcgggagatccagcagacggaggagaagtacactgacacgctgggctccatccagcagcatttcttgaagcccctgcaacggttcctgaaacctcaagacattgagatcatctttatcaacattgaggacctgcttcgtgttcatactcacttcctaaaggagatgaaggaagccctgggcacccctggcgcagccaatctctaccaggtcttcatcaaatacaaggagaggttcctcgtctatggccgctactgcagccaggtggagtcagccagcaaacacctggaccgtgtggccgcagcccgggaggacgtgcagatgaagctggaggaatgttctcagagagccaacaacgggaggttcaccctgcgggacctgctgatggtgcctatgcagcgagttctcaaatatcacctccttctccaggagctggtgaaacacacgcaggaggcgatggagaaggagaacctgcggctggccctggatgccatgagggacctggctcagtgcgtgaacgaggtcaagcgagacaacgagacactgcgacagatcaccaatttccagctgtccattgagaacctggaccagtctctggctcactatggccggcccaagatcgacggggaactcaagatcacctcggtggaacggcgctccaagatggacaggtatgccttcctgctcgacaaagctctactcatctgtaagcgcaggggagactcctatgacctcaaggactttgtaaacctgcacagcttccaggttcgggatgactcttcaggagaccgagacaacaagaagtggagccacatgttcctcctgatcgaggaccaaggtgcccagggctatgagctgttcttcaagacaagagaattgaagaagaagtggatggagcagtttgagatggccatctccaacatctatccggagaatgccaccgccaacgggcatgacttccagatgttctcctttgaggagaccacatcctgcaaggcctgtcagatgctgcttagaggtaccttctatcagggctaccgctgccatcggtgccgggcatctgcacacaaggagtgtctggggagggtccctccatgtggccgacatgggcaagatttcccaggaactatgaagaaggacaaactacatcgcagggctcaggacaaaaagaggaatgagctgggtctgcccaagatggaggtgtttcaggaatactacgggcttcctccaccccctggagccattggaccctttctacggctcaaccctggagacattgtggagctcacgaaggctgaggctgaacagaactggtgggagggcagaaatacatctactaatgaaattggctggtttccttgtaacagggtgaagccctatgtccatggccctcctcaggacctgtctgttcatctctggtacgcaggccccatggagcgggcaggggcagagagcatcctggccaaccgctcggacgggactttcttggtgcggcagagggtgaaggatgcagcagaatttgccatcagcattaaatataacgtcgaggtcaagcacattaaaatcatgacagcagaaggactgtaccggatcacagagaaaaaggctttccgggggcttacggagctggtggagttttaccagcagaactctctaaaggattgcttcaagtctctggacaccaccttgcagttccccttcaaggagcctgaaaagagaaccatcagcaggccagcagtgggaagcacaaagtattttggcacagccaaagcccgctatgacttctgcgcccgagaccgatcagagctgtcgctcaaggagggtgacatcatcaagatccttaacaagaagggacagcaaggctggtggcgaggggagatctatggccgggttggctggttccctgccaactacgtggaggaagattattctgaatactgctgagccctggtgccttggcagagagacgagaaactccaggctctgagcccggcgtgggcaggcagcggagccaggggctgtgacagctcccggcgggtggagactttgggatggactggaggagcgcagcgtccagctggcggtgctcccgggatgtgccctgacatggttaatttataacaccccgatttcctcttgggtcccctcaagcagacggggctcaagggggttacatttaataaaaggatgaagatgg

SEQ ID NO: 1559 - DNA, 316 bp, Artificial Sequence
  Description of Artificial sequences:primer
  misc_feature (1)..(316): 3' terminal sequence from clone image:809611. protein phosphatase 1, regulatory (inhibitor) subunit 14a(PPP1R14A) gene.
attgttacagaaccattaaatacaacttatacacaagcaagctgggcggcgtccggggggcagggagagtgcaagagggtcaggggtgagcagtccgggcccggtcctggagggggctgaggctgccgtcgtgggaggggcttggctggcggaggcggagctgcctgtggaggccttgaagctttgccagcagctcctggatgaagtcctcgacaggtttcccacatgacttcaggagtccctggattttccggcttctctcctcttcactctctaactccaacaattcatcaatgttgatctcatcgggcatgtc

SEQ ID NO: 1560 - DNA, 723 bp, Artificial Sequence
  Description of Artificial sequences:primer
  misc_feature (1)..(723): protein phosphatase 1, regulatory (inhibitor) subunit 14a(PPP1R14A) gene.
gcctcaagccgacgcagcggcctactctcgcactgcagacggggaaactgaggcctgaggcggccggggtggggcagacctcccggcgagcccgagcccccgcccccggctagccccgccctggcccgtaagaagcacccggggcgcgaggcgaaggcgcacagcgcggggccaggctgggtccagcagcgcgatggcagctcagcggctgggcaagcgcgtgctgagcaagctgcagtctccatcgcgggcccgcgggccagggggcagtcccggggggctgcagaagcggcacgcgcgcgtcaccgtcaagtatgaccggcgggagctgcagcggcggctggacgtggagaagtggatcgacgggcgcctggaggagctgtaccgcggcatggaggcagacatgcccgatgagatcaacattgatgaattgttggagttagagagtgaagaggagagaagccggaaaatccagggactcctgaagtcatgtgggaaacctgtcgaggacttcatccaggagctgctggcaaagcttcaaggcctccacaggcagcccggcctccgccagccaagcccctcccacgacggcagcctcagccccctccaggaccgggcccggactgctcacccctgaccctcttgcactctccctgccccccggacgccgcccagcttgcttgtgtataagttgtatttaatggttctgtaacaataaaaaaa

SEQ ID NO: 1561 - DNA, 406 bp, Artificial Sequence
  Description of Artificial sequences:primer
  misc_feature (1)..(406): 3' terminal sequence from clone image:809959. ets variant gene 4 (e1a enhancer binding protein, e1af)(ETV4) gene.
gggagaagtgggggcctttattaaggtctggcagatgtggtggaggtggaagtacaaacccaggcctgggcctaggaaagggcagaagaaaggcaaagggtcccttggagcaggaacccatccctctctgcttatacccagcacccctcatcccaggttcctttcttcaacctccgcctgcctctgggaacacagagcaccaagaactgacaaaccgggaccctccagggccacagcgtggggcagagtccaggcttctgtctccccgcagtgggagatctggggagctcagtgaacctcctcaccctcctgccagtatgaagttgggaagcgccttctctgtcccccagaacgaacaaactcttgttctctgtggttggggaaaaggtgtggggggcttggacct

SEQ ID NO: 1562 - DNA, 456 bp, Artificial Sequence
  Description of Artificial sequences:primer
  misc_feature (1)..(456): 5' terminal sequence from clone image:809959. ets variant gene 4 (e1a enhancer binding protein, e1af)(ETV4) gene.
agcgttacgtgtacaagtttgtgtgtgagcccgaggcctcttctctttggccttcccggacaatcagcgtccagctctcaaggctgagtttgaccggcctgtcagtgaggaggacacagtccctttgtcccacttggatgagagccccgcctacctcccagagctggctggccccgcccagccatttggccccaagggtggctactcttactagcccccagcggctgttccccctgccgcaggtgggtgctgccctgtgtacatataaatgaatctggtgttggggaaaccttcatctgaaacccacagatgtctctggggcagatccccactgtcctaccagttgccctagcccagactctgagctgctcaccggagtcattgggaaggaaaagtggagaaatggcaagtctagagtctcagaaactcccctggggggtttcacctggggccctg

SEQ ID NO: 1563 - DNA, 2212 bp, Artificial Sequence
  Description of Artificial sequences:primer
  misc_feature (1)..(2212): ets variant gene 4 (e1a enhancer binding protein, e1af)(ETV4) gene.
gcccggctcctgggagcaggtctcggcccccgcttggggccccggccgtgcggccggagggagcggccggatggagcggaggatgaaagccggatacttggaccagcaagtgccctacaccttcagcagcaaatcgcccggaaatgggagcttgcgcgaagcgctgatcggcccgctggggaagctcatggacccgggctccctgccgcccctcgactctgaagatctcttccaggatctaagtcacttccaggagacgtggctcgctgaagctcaggtaccagacagtgatgagcagtttgttcctgatttccattcagaaaacctagctttccacagccccaccaccaggatcaagaaggagccccagagtccccgcacagacccggccctgtcctgcagcaggaagccgccactcccctaccaccatggcgagcagtgcctttactccagtgcctatgacccccccagacaaatcgccatcaagtcccctgcccctggtgcccttggacagtcgcccctacagccctttccccgggcagagcaacggaatttcctgagatcctctggcacctcccagccccaccctggccatgggtacctcggggaacatagctccgtcttccagcagcccctggacatttgccactccttcacatctcagggagggggccgggaacccctcccagccccctaccaacaccagctgtcggagccctgcccaccctatccccagcagagctttaagcaagaataccatgatcccctgtatgaacaggcgggccagccagccgtggaccagggtggggtcaatgggcacaggtacccaggggcgggggtggtgatcaaacaggaacagacggacttcgcctacgactcagatgtcaccgggtgcgcatcaatgtacctccacacagagggcttctctgggccctctccaggtgacggggccatgggctatggctatgagaaacctctgcgaccattcccagatgatgtctgcgttgtccctgagaaatttgaaggagacatcaagcaggaaggggtcggtgcatttcgagaggggccgccctaccagcgccggggtgccctgcagctgtggcaatttctggtggccttgctggatgacccaacaaatgcccatttcattgcctggacgggccggggaatggagttcaagctcattgagcctgaggaggtcgccaggctctggggcatccagaagaaccggccagccatgaattacgacaagctgagccgctcgctccgatactattatgagaaaggcatcatgcagaaggtggctggtgagcgttacgtgtacaagtttgtgtgtgagcccgaggccctcttctctttggccttcccggacaatcagcgtccagctctcaaggctgagtttgaccggcctgtcagtgaggaggacacagtccctttgtcccacttggatgagagccccgcctacctcccagagctggctggccccgcccagccatttggccccaagggtggctactcttactagcccccagcggctgttccccctgccgcaggtgggtgctgccctgtgtacatataaatgaatctggtgttggggaaaccttcatctgaaacccacagatgtctctggggcagatccccactgtcctaccagttgccctagcccagactctgagctgctcaccggagtcattgggaaggaaaagtggagaaatggcaagtctagagtctcagaaactcccctgggggtttcacctgggccctggaggaattcagctcagcttcttcctaggtccaagccccccacaccttttccccaaccacagagaacaagagtttgttctgttctgggggacagagaaggcgcttcccaacttcatactggcaggagggtgaggaggttcactgagctccccagatctcccactgcggggagacagaagcctggactctgccccacgctgtggccctggagggtaccggtttgtcagttcttggtgctctgtgttcccagaggcaggcggaggttgaagaaaggaacctgggatgaggggtgctgggtataagcagagagggatgggttcctgctccaagggaccctttgcctttcttctgccctttcctaggcccaggcctgggtttgtacttccacctccaccacatctgccagaccttaataaaggcccccacttctcccaaaaaaaaaaaaaaa

SEQ ID NO: 1564 - DNA, 189 bp, Artificial Sequence
  Description of Artificial sequences:primer
  misc_feature (1)..(189): 3' terminal sequence from clone image:810813. s100 calcium binding protein a2(S100A2) gene.
atcaacagacaaaaaaagtttattgaatacaaaactcaaaggcatcaacagtcctgggcccaagagatccatggcaggaagtcaagagttctgcttcagggtcggtctgggcagccctggaagaggtcattgcacatgacagtgatgagtgccaggaaaacagcatactcctggaagtccacctgctgg

SEQ ID NO: 1565 - DNA, 224 bp, Artificial Sequence
  Description of Artificial sequences:primer
  misc_feature (1)..(224): 5' terminal sequence from clone image:810813. s100 calcium binding protein a2(S100A2) gene.
agaagctgatgggcagcctggatgagaacagtgaccagcaggtggacttccaggagtatgctgttttcctggcactcatcactgtcatgtgcaatgacttcttccagggctgcccagaccgaccctgaagcagaactcttgacttcctgccatggatctcttgggcccaggactgttgatgcctttgagttttgtattcaataaactttttttgtctgttgata

SEQ ID NO: 1566 - DNA, 428 bp, Artificial Sequence
  Description of Artificial sequences:primer
  misc_feature (1)..(428): s100 calcium binding protein a2(S100A2) gene.
ctgggtctgtctctgccacctggtctgccacagatccatgatgtgcagttctctggagcaggcgctggctgtgctggtcactaccttccacaagtactcctgccaagagggcgacaagttcaagctgagtaagggggaaatgaaggaacttctgcacaaggagctgcccagctttgtgggggagaaagtggatgaggaggggctgaagaagctgatgggcagcctggatgagaacagtgaccagcaggtggacttccaggagtatgctgttttcctggcactcatcactgtcatgtgcaatgacttcttccagggctgcccagaccgaccctgaagcagaactcttgacttcctgccatggatctcttgggcccaggactgttgatgcctttgagttttgtattcaataaactttttttgtctgttga

SEQ ID NO: 1567 - DNA, 501 bp, Artificial Sequence
  Description of Artificial sequences:primer
  misc_feature (1)..(501): 3' terminal sequence from clone image:811740. integrin, alpha 2 (cd49b, alpha 2 subunit of vla-2 receptor)(ITGA2) gene.
aaataaaattttgttggaatgaagcagcaaattctcacagctgttaaaagaattggactctggcatacctaactggagaataccatgctgttttttctataaaccgctggcattttatgccttttttgtttgttttgtgttgtcaactacaaagtaattctgtaaacagtacagatagccctggactgccaccacgggccaggccagggtagtcaaggttgtccatatgcacatgggcagataacctgttttcctttgacatttttttccaagtcaaattcttggaggattgtgtatttgtattataggaagtccagatcatagacttttaaaactaaaagcatcactgctgaactccagctcagtcttcccattttataatgaggactctgaagtttatagaggtcaaggacttgtccaaagctttagatatgtagtgtctgtgccttttcctcaagtttccctagagaatgtgggggctcagacagagaataaggtgca

SEQ ID NO: 1568 - DNA, 648 bp, Artificial Sequence
  Description of Artificial sequences:primer
  misc_feature (1)..(648): 5' terminal sequence from clone image:811740. integrin, alpha 2 (cd49b, alpha 2 subunit of vla-2 receptor)(ITGA2) gene.
  misc_feature (539)..(539): n is a, c, g, or t
aaactaggtaaaatttgttgttggttccttttagaccacggctgccccttccacaccccatcttgctctaatgatcaaaacatgcttgaataactgagcttagagtatacctcctatatgtccatttaagtcaggagagggggcgatatagagactaaggcacaaaattttgtttaaaactcagaatataacatgtaaaatcccatctgctagaagcccatcctgtgccagaggaaggaaaaggaggaaatttcctttctcttttaggaggcacaacagttctcttctaggatttgtttggctgactggcagtaacctagtgaatttttgaaagatgagtaatttctttggcaaccttcctcctcccttactgaaccactctcccacctcctggtggtaccattattatagaagccctctacagcctgactttctctccagcggtccaaagttatcccctcctttacccctcatccaaagttcgcactccttcaggacagctgctgtgcattagatattaggggggaaagtcatctgtntaatttacacacttgcatgaattactggatataactccttaactcagggagctatgtcatttagtgctaacaaagtagaaaaatagctcgagtgagttctaatggtgga

SEQ ID NO: 1569 - DNA, 5361 bp, Artificial Sequence
  Description of Artificial sequences:primer
  misc_feature (1)..(5361): integrin, alpha 2 (cd49b, alpha 2 subunit of vla-2 receptor)(ITGA2) gene.
ctgcaaacccagcgcaactacggtcccccggtcagacccaggatggggccagaacggacaggggccgcgccgctgccgctgctgctggtgttagcgctcagtcaaggcattttaaattgttgtttggcctacaatgttggtctcccagaagcaaaaatattttccggtccttcaagtgaacagtttgggtatgcagtgcagcagtttataaatccaaaaggcaactggttactggttggttcaccctggagtggctttcctgagaaccgaatgggagatgtgtataaatgtcctgttgacctatccactgccacatgtgaaaaactaaatttgcaaacttcaacaagcattccaaatgttactgagatgaaaaccaacatgagcctcggcttgatcctcaccaggaacatgggaactggaggttttctcacatgtggtcctctgtgggcacagcaatgtgggaatcagtattacacaacgggtgtgtgttctgacatcagtcctgattttcagctctcagccagcttctcacctgcaactcagccctgcccttccctcatagatgttgtggttgtgtgtgatgaatcaaatagtatttatccttgggatgcagtaaagaattttttggaaaaatttgtacaaggccttgatataggccccacaaagacacaggtggggttaattcagtatgccaataatccaagagttgtgtttaacttgaacacatataaaaccaaagaagaaatgattgtagcaacatcccagacatcccaatatggtggggacctcacaaacacattcggagcaattcaatatgcaagaaaatatgcctattcagcagcttctggtgggcgacgaagtgctacgaaagtaatggtagttgtaactgacggtgaatcacatgatggttcaatgttgaaagctgtgattgatcaatgcaaccatgacaatatactgaggtttggcatagcagttcttgggtacttaaacagaaacgcccttgatactaaaaatttaataaaagaaataaaagcgatcgctagtattccaacagaaagatactttttcaatgtgtctgatgaagcagctctactagaaaaggctgggacattaggagaacaaattttcagcattgaaggtactgttcaaggaggagacaactttcagatggaaatgtcacaagtgggattcagtgcagattactcttctcaaaatgatattctgatgctgggtgcagtgggagcttttggctggagtgggaccattgtccagaagacatctcatggccatttgatctttcctaaacaagcctttgaccaaattctgcaggacagaaatcacagttcatatttaggttactctgtggctgcaatttctactggagaaagcactcactttgttgctggtgctcctcgggcaaattataccggccagatagtgctatatagtgtgaatgagaatggcaatatcacggttattcaggctcaccgaggtgaccagattggctcctattttggtagtgtgctgtgttcagttgatgtggataaagacaccattacagacgtgctcttggtaggtgcaccaatgtacatgagtgacctaaagaaagaggaaggaagagtctacctgtttactatcaaaaagggcattttgggtcagcaccaatttcttgaaggccccgagggcattgaaaacactcgatttggttcagcaattgcagctctttcagacatcaacatggatggctttaatgatgtgattgttggttcaccactagaaaatcagaattctggagctgtatacatttacaatggtcatcagggcactatccgcacaaagtattcccagaaaatcttgggatccgatggagcctttaggagccatctccagtactttgggaggtccttggatggctatggagatttaaatggggattccatcaccgatgtgtctattggtgcctttggacaagtggttcaactctggtcacaaagtattgctgatgtagctatagaagcttcattcacaccagaaaaaatcactttggtcaacaagaatgctcagataattctcaaactctgcttcagtgcaaagttcagacctactaagcaaaacaatcaagtggccattgtatataacatcacacttgatgcagatggattttcatccagagtaacctccagggggttatttaaagaaaacaatgaaaggtgcctgcagaagaatatggtagtaaatcaagcacagagttgccccgagcacatcatttatatacaggagccctctgatgttgtcaactctttggatttgcgtgtggacatcagtctggaaaaccctggcactagccctgcccttgaagcctattctgagactgccaaggtcttcagtattcctttccacaaagactgtggtgaggatggactttgcatttctgatctagtcctagatgtccgacaaataccagctgctcaagaacaaccctttattgtcagcaaccaaaacaaaaggttaacattttcagtaacactgaaaaataaaagggaaagtgcatacaacactggaattgttgttgatttttcagaaaacttgttttttgcatcattctccctaccggttgatgggacagaagtaacatgccaggtggctgcatctcagaagtctgttgcctgcgatgtaggctaccctgctttaaagagagaacaacaggtgacttttactattaactttgacttcaatcttcaaaaccttcagaatcaggcgtctctcagtttccaagccttaagtgaaagccaagaagaaaacaaggctgataatttggtcaacctcaaaattcctctcctgtatgatgctgaaattcacttaacaagatctaccaacataaatttttatgaaatctcttcggatgggaatgttccttcaatcgtgcacagttttgaagatgttggtccaaaattcatcttctccctgaaggtaacaacaggaagtgttccagtaagcatggcaactgtaatcatccacatccctcagtataccaaagaaaagaacccactgatgtacctaactggggtgcaaacagacaaggctggtgacatcagttgtaatgcagatatcaatccactgaaaataggacaaacatcttcttctgtatctttcaaaagtgaaaatttcaggcacaccaaagaattgaactgcagaactgcttcctgtagtaatgttacctgctggttgaaagacgttcacatgaaaggagaatactttgttaatgtgactaccagaatttggaacgggactttcgcatcatcaacgttccagacagtacagctaacggcagctgcagaaatcaacacctataaccctgagatatatgtgattgaagataacactgttacgattcccctgatgataatgaaacctgatgagaaagccgaagtaccaacaggagttataataggaagtataattgctggaatccttttgctgttagctctggttgcaattttatggaagctcggcttcttcaaaagaaaatatgaaaagatgaccaaaaatccagatgagattgatgagaccacagagctcagtagctgaaccagcagacctacctgcagtgggaaccggcagcatcccagccagggtttgctgtttgcgtgcatggatttctttttaaatcccatattttttttatcatgtcgtaggtaaactaacctggtattttaagagaaaactgcaggtcagtttggatgaagaaattgtggggggtgggggaggtgcggggggcaggtagggaaataatagggaaaatacctattttatatgatgggggaaaaaaagtaatctttaaactggctggcccagagtttacattctaatttgcattgtgtcagaaacatgaaatgcttccaagcatgacaacttttaaagaaaaatatgatactctcagattttaagggggaaaactgttctctttaaaatatttgtctttaaacagcaactacagaagtggaagtgcttgatatgtaagtacttccacttgtgtatattttaatgaatattgatgttaacaagaggggaaaacaaaacacaggttttttcaatttatgctgctcatccaaagttgccacagatgatacttccaagtgataattttatttataaactaggtaaaatttgttgttggttccttttataccacggctgccccttccacaccccatcttgctctaatgatcaaaacatgcttgaataactgagcttagagtatacctcctatatgtccatttaagttaggagagggggcgatatagagactaaggcacaaaattttgtttaaaactcagaatataacatttatgtaaaatcccatctgctagaagcccatcctgtgccagaggaaggaaaaggaggaaatttcctttctcttttaggaggcacaacagttctcttctaggatttgtttggctgactggcagtaacctagtgaatttttgaaagatgagtaatttctttggcaaccttcctcctcccttactgaaccactctcccacctcctggtggtaccattattatagaagccctctacagcctgactttctctccagcggtccaaagttatcccctcctttacccctcatccaaagttcccactccttcaggacagctgctgtgcattagatattaggggggaaagtcatctgtttaatttacacacttgcatgaattactgtatataaactccttaacttcagggagctattttcatttagtgctaaacaagtaagaaaaataagctagagtgaatttctaaatgttggaatgttatgggatgtaaacaatgtaaagtaaaacactctcaggatttcaccagaagttacagatgaggcactggaaaccaccaccaaattagcaggtgcaccttctgtggctgtcttgtttctgaagtactttttcttccacaagagtgaatttgacctaggcaagtttgttcaaaaggtagatcctgagatgatttggtcagattgggataaggcccagcaatctgcattttaacaagcaccccagtcactaggatgcagatggaccacactttgagaaacaccacccatttctactttttgcaccttattttctctgttcctgagcccccacattctctaggagaaacttagattaaaattcacagacactacatatctaaagctttgacaagtccttgacctctataaacttcagagtcctcattataaaatgggaagactgagctggagttcagcagtgatgctttttagttttaaaagtctatgatctgatctggacttcctataatacaaatacacaatcctccaagaatttgacttggaaaag

SEQ ID NO: 1570 - DNA, 533 bp, Artificial Sequence
  Description of Artificial sequences:primer
  misc_feature (1)..(533): 3' terminal sequence from clone image:811939. tyrosine 3-monooxygenase/tryptophan 5-monooxygenase activation protein, zeta polypeptide(YWHAZ) gene.
ttttttttttttttctccattgcacttttatttgaatgtaatatttgggacaattattcaaaagggccaatatttcccaatttaatctgaggtcataataaaacaagcaacaaaacagtgtttgggatttcagtttctcacccttatcatcaagactcactgcctcccatcatcaatatttattgagcatttacagtgtactaggcacaatagaacatacagaaaacattgtccctgctcttgaggagcttacattctaaaagaaaaaatacaccttttttaaaatggcatttttgtttggtgttttctgcaaagtactgaggaaatattttgtaaagtgagctttgggtataacttagccccatcattatttagagaatagaggaggaagaaagaggaaggattttaaaggcagacaatgacagaccattcaggataggtagggttttaaagggagataaacacagtctcatcaactaaggagagatttgctgcagtaaataggatgagggaaatagtctgtgggatgcaag

SEQ ID NO: 1571 - DNA, 551 bp, Artificial Sequence
  Description of Artificial sequences:primer
  misc_feature (1)..(551): 5' terminal sequence from clone image:811939. tyrosine 3-monooxygenase/tryptophan 5-monooxygenase activation protein, zeta polypeptide(YWHAZ) gene.
acttaggaagccacaatgttcttggcccatcatgacattgggtagcattaactgtaagttttgtgcttccaaatcactttttggtttttaagaatttcttgatactcttatagcctgccttcaattttgatcctttattctttctatttgtcaggtgcacaagattaccttcctgttttagccttctgtcttgtcaccaaccattcttacttggtggccatgtacttggaaaaaggccgcatgatctttctggctccactcagtgtctaaggcaccctgcttcctttgcttgcatcccacagactatttccctcatcctatttactgcagcaaatctctccttagttgatgagactgtgtttatctccctttaaaaccctacctatcctgaatggtctgtcattgtctgcctttaaaatccttcctctttcttcctcctctattctctaaataatgatggggctaagttatacccaaagctcactttacaaaatatttcctcagtactttgcagaaaacaccaaacaaaaatgccattttaaaaaaggtgt

SEQ ID NO: 1572 - DNA, 2876 bp, Artificial Sequence
  Description of Artificial sequences:primer
  misc_feature (1)..(2876): tyrosine 3-monooxygenase/tryptophan 5-monooxygenase activation protein, zeta polypeptide(YWHAZ) gene.
gcctgtgagcagcgagatccagggacagagtctcagcctcgccgctgctgccgccgccgccgcccagagactgctgagcccgtccgtccgccgccaccacccactccggacacagaacatccagtcatggataaaaatgagctggttcagaaggccaaactggccgagcaggctgagcgatatgatgacatggcagcctgcatgaagtctgtaactgagcaaggagctgaattatccaatgaggagaggaatcttctctcagttgcttataaaaatgttgtaggagcccgtaggtcatcttggagggtcgtctcaagtattgaacaaaagacggaaggtgctgagaaaaaacagcagatggctcgagaatacagagagaaaattgagacggagctaagagatatctgcaatgatgtactgtctcttttggaaaagttcttgatccccaatgcttcacaagcagagagcaaagtcttctatttgaaaatgaaaggagattactaccgttacttggctgaggttgccgctggtgatgacaagaaagggattgtcgatcagtcacaacaagcataccaagaagcttttgaaatcagcaaaaaggaaatgcaaccaacacatcctatcagactgggtctggcccttaacttctctgtgttctattatgagattctgaactccccagagaaagcctgctctcttgcaaagacagcttttgatgaagccattgctgaacttgatacattaagtgaagagtcatacaaagacagcacgctaataatgcaattactgagagacaacttgacattgtggacatcggatacccaaggagacgaagctgaagcaggagaaggaggggaaaattaaccggccttccaacttttgtctgcctcattctaaaatttacacagtagaccatttgtcatccatgctgtcccacaaatagttttttgtttacgatttatgacaggtttatgttacttctatttgaatttctatatttcccatgtggtttttatgtttaatattaggggagtagagccagttaacatttagggagttatctgttttcatcttgaggtggccaatatggggatgtggaatttttatacaagttataagtgtttggcatagtacttttggtacattgtggcttcaaaagggccagtgtaaaactgcttccatgtctaagcaaagaaaactgcctacatactggtttgtcctggcggggaataaaagggatcattggttccagtcacaggtgtagtaattgtgggtactttaaggtttggagcacttacaaggctgtggtagaatcataccccatggataccacatattaaaccatgtatatctgtggaatactcaatgtgtacacctttgactacagctgcagaagtgttcctttagacaaagttgtgacccattttactctggataagggcagaaacggttcacattccattatttgtaaagttacctgctgttagctttcattatttttgctacactcattttatttgtatttaaatgttttaggcaacctaagaacaaatgtaaaagtaaagatgcaggaaaaatgaattgcttggtattcattacttcatgtatatcaagcacagcagtaaaacaaaaacccatgtatttaacttttttttaggatttttgcttttgtgattttttttttttttttttgatacttgcctaacatgcatgtgctgtaaaaatagttaacagggaaataacttgagatgatggctagctttgtttaatgtcttatgaaattttcatgaacaatccaagcataattgttaagaacacgtgtattaaattcatgtaagtggaataaaagttttatgaatggacttttcaactactttctctacagcttttcatgtaaattagtcttggttctgaaacttctctaaaggaaattgtacattttttgaaatttattccttattccctcttggcagctaatgggctcttaccaagtttaaacacaaaatttatcataacaaaaatactactaatataactactgtttccatgtcccatgatcccctctcttcctccccaccctgaaaaaaatgagttcctattttttctgggagagggggggattgattagaaaaaaatgtagtgtgttccatttaaaattttggcatatggcattttctaacttaggaagccacaatgttcttggcccatcatgacattgggtagcattaactgtaagttttgtgcttccaaatcactttttggtttttaagaatttcttgatactcttatagcctgccttcaattttgatcctttattctttctatttgtcaggtgcacaagattaccttcctgttttagccttctgtcttgtcaccaaccattcttacttggtggccatgtacttggaaaaaggccgcatgatctttctggctccactcagtgtctaaggcaccctgcttcctttgcttgcatcccacagactatttccctcatcctatttactgcagcaaatctctccttagttgatgagactgtgtttatctccctttaaaaccctacctatcctgaatggtctgtcattgtctgcctttaaaatccttcctctttcttcctcctctattctctaaataatgatggggctaagttatacccaaagctcactttacaaaatatttcctcagtactttgcagaaaacaccaaacaaaaatgccattttaaaaaaggtgtattttttcttttagaatgtaagctcctcaagagcagggacaatgttttctgtatgttctattgtgcctagtacactgtaaatgctcaataaatattgatgatgggaggcagtgagtcttgatgataagggtgagaaactgaaatccc

SEQ ID NO: 1573 - DNA, 406 bp, Artificial Sequence
  Description of Artificial sequences:primer
  misc_feature (1)..(406): 3' terminal sequence from clone image:813384. bh-protocadherin (brain-heart)(PCDH7) gene.
tactgtttcatacatttattttattttcatactatttttctgtatatgagaaagaaaaagactcaaaaataaaatgtacaacaagtggaacaagcagtgattggctgacaccccacggccaagggcaggctccagcaggtttcggagtagaaaggtcatcacagtatggtgcataatggagcatcatattagagtggaattcagccaaacacagtaatgtatggatgtagacgcatctgaaagaaggaaaataaagatttatgcaggtaaaaaaaaatcgataaagaaattttccccagtgtcttatgcccaattggaaagctttagtagagatttcggagctaagaaaaattttaatgccaactttgtgtttgtaaataataaatacacttggggggtgggggaa

SEQ ID NO: 1574 - DNA, 4921 bp, Artificial Sequence
  Description of Artificial sequences:primer
  misc_feature (1)..(4921): bh-protocadherin (brain-heart)(PCDH7) gene.
gaatgcaggtgagaaaaggcacggactctgcggctgcgaacccaaacttgggcaccgcacggtgcgcactgctcagccttcgcccccgtgggcgaaaggctgctgcggtttcaggcggctgcttcgtgactaatgaccttgcgcagagttgttaagaaaaaagagaaacccgcgctctccggggtgagaagggactgactctgggcgtctctgaagatggctcgggcttctctttggcgcgccggggggaccctgacactgaccgctctgtgacgcgagtagtctcccctgcaccgtgcccgaagcgacgtgccgggggatttttcattctcgatctgttgactggctcccccgctgcatgagcagagtcggagttgagactggcttgttgctggccccagcgcctggtgcaggaagcgactcacgtttgtctgggtggccggagccggagcagagcctgggtttggagtgagtgcctggaacgtgaattggactcaactcgagtagcagcaaagaccagcgggctggcaggcgggggaggctgcaggctcattccccacctcttcccagccccactgcccgtctgccggagcggttctggccccttccgacagagcggggactagagccggggattctccgcccgctgaggggatgactctgggttgggggagcgccgaacccgcggcgcgcagtgtcccgtgaactgtgagtactgcgactgaacggcggcaggcgagcgggcgattagcacccattgcatgaattatgaaacaataactttcggaagaagcaggaggaaaaaaagaagcatctatcgctgccctcccacccccattcccggccaactctccacgccgcttttgccccctccctcccctccctctcgctccttcctttccgggagaggggagaggactcgggggagggcaggcggccggccccggaggaggggggcgccgagggggctgtggttagaaggagcagtagcagcagcagcaggagaagatgctgaggatgcggaccgcgggatgggcgcgcggctggtgcttgggctgctgcctcctcctgccgctctcgctcagcctggcggccgccaagcagctcctccggtaccggctggccgaggagggccccgccgacgtccgcatcggcaacgtggcttcagacctgggcatcgtgaccggatcgggtgaggtgactttcagcctggagtccggttccgagtacctgaagatcgacaacctcactggcgagctgagcacgagcgagcggcgcatcgaccgcgagaagctgccccagtgtcagatgatcttcgacgagaacgagtgcttcctggacttcgaggtgtcggtgatcgggccctcgcagagctgggtggacctgtttgagggtcaggtcatcgtgcttgacatcaacgacaacacgcccaccttcccgtcgcccgtgctcacgctcacggtggaggagaatcggccggtgggcacactttacctgctgcccacagccaccgaccgcgacttcggccgcaacggcatcgagcgctacgagctgctccaggagcccggaggcggcggcagcggcggcgagagccggcgcgccggggcggccgacagcgccccctaccccgggggcggcgggaacggcgcgagcggcggcggctcgggaggctccaagcggcggctggacgcatcagagggcggcggcggcaccaaccccggcggccgcagcagcgtgttcgagctgcaggtggcggacaccccggacggcgagaagcagccgcagctgatcgtgaagggggcgctggaccgcgagcagcgcgactcctacgagctgaccctgcgagtgcgcgacggcggcgacccgcctcgctcctcgcaggccatcctacgggtcctcatcaccgacgtgaacgacaacagcccccgcttcgagaagagcgtgtacgaggccgacttggctgagaacagcgccccggggacccccatcctgcaactgcgcgcagccgacttggacgtgggggtcaacgggcagatcgaatacgtgttcggggcggccaccgagtcggtgaggcggctgctgcgccttgacgagacgtccggctggctcagcgtcctgcaccggatcgaccgcgaggaggtgaaccagctgcgcttcacggtcatggcccgcgaccgcgggcagccccccaagaccgacaaggccaccgtggtccttaacatcaaagacgagaacgacaacgtgccgtccattgaaatccgcaagattgggcgcatccccctcaaggacggggtggccaacgtggccgaggacgttctggtcgacacccccatcgctctggtgcaggtgtccgaccgagaccaaggcgagaacggggtggtcacctgcaccgtggtgggcgacgtgcccttccagctcaagccagccagcgacaccgagggcgaccagaacaagaaaaagtacttcttgcacacctcgacccctctggactatgaggccacccgggagttcaacgtggtcatcgtggcggtggactcaggcagccccagcctctcgagcaacaactccctgattgtcaaggtgggagacaccaacgacaacccgcccatgttcggccagtcggtggtggaggtttacttccctgagaacaacatcccgggcgagagggtggccacggtgctggcgacagacgcagacagcggtaagaacgccgagatcgcctactcgctggactcctctgtgatggggatctttgccatcgatcccgattctggggacatcctggtcaataccgtgctggaccgcgagcagactgacaggtatgagtttaaagttaacgccaaagacaaaggcatccccgtgctgcagggcagcactacggtgattgtgcaggtggctgataaaaatgacaatgaccctaagtttatgcaggacgtcttcaccttttatgtgaaagaaaacttgcagcccaacagccctgtggggatggtcaccgtgatggatgctgacaaggggcggaatgcagagatgagcctgtacatagaggagaacaataacattttttctattgaaaatgacacggggaccatttactccacaatgtcttttgaccgggaacatcagaccacatacactttcagagtcaaggctgtggatgggggagatcctcccagatctgccacagctacagtctcgctttttgtgatggatgaaaatgacaatgctcccacagttacccttcccaaaaacatttcctacactttactgccaccttcgagtaatgtcaggacagtagtagctacagtgttggcaacagacagtgatgatggcatcaatgcagacctgaactacagcattgtgggaggaaatcccttcaagctgtttgaaattgatcccactagtggtgtggtttccttagtgggaaaactcacccaaaagcattatggcttgcacaggttggtggtgcaagtgaatgacagtgggcagccttcccagtccaccacgactctggtgcacgtgtttgtcaatgaaagtgtttctaatgcaactgcgattgactcccagatagctagaagtttgcacatcccactcacccaggatatagctggtgacccaagctatgaaattagcaaacagagactcagtattgtcattggcgtggttgctggcattatgacggtgattctaatcatcttaattgtagtgatggcaaggtactgcaggtccaaaaataaaaatggctatgaagccggcaaaaaagatcacgaagacttttttacaccccaacagcatgacaaatctaaaaagcctaaaaaggacaagaaaaacaaaaaatctaagcagcctctctacagcagcattgtcactgtggaggcttctaagccaaatggacagaggtatgatagtgtcaatgagaagctgtcagacagcccaagcatggggcgatacaggtccgttaatggtgggcccggcagtcctgacctggcaaggcattacaaatctagttccccattgcctactgttcagcttcatccccagtcaccaactgcaggaaaaaaacaccaggccgtacaagatctaccaccagccaacacatttgtgggagcaggagacaacatttcaattggatcagatcactgctctgagtacagctgtcaaaccaataacaagtacagcaaacaggtaagatgtatcccaaatatatttaaatatcccagggagggctaataactctgagacagattatcttctgtaaagttttgtcttctcgtttttaaagttattaaaattttaacagtaggaatttaatgttaatttttgcaccattaatttagcaaaggccatctacaagaggtataccactgtattttgcaaattagaattaaggttcactaaactactgaaagaagtattcagagtaggcagtgtttggcagttctctttgcacttgacatccctaattcatactacatttttttgtttccagaataaatatgtgtgtattacttagatggttagttttcacctgaaattattttcttctgtggcaactaagtggataattacatccagagaaaaagtttctaaagttactactggtgtctatgcaaattggattccatagaagttttagctatgttatttacaatgcaggattttacagataaatagatgctgattcatgcagatgtagtactaagtctgagatattgaaatactgactactttgatgaaactgctggtttaaaaatatttactgatatgcaaatgtcatgcaaaactccactttcaatcttttatatctataataatcgatacctataacaattagtgttctataatgatatgcaattaccatttgcattctttctgtttggtattaaaagtttgcaaacaaaaatacattgcatgagccatttat

SEQ ID NO: 1575 - DNA, 421 bp, Artificial Sequence
  Description of Artificial sequences:primer
  misc_feature (1)..(421): 3' terminal sequence from clone image:813755. similar to zinc finger protein 7 (zinc finger protein kox4) (zinc finger protein hf.16).
tttttcgtttgacagatgtttattggctcacatagctgaaaagttctgaggtagctctgcttcaggtaaagcttggtctagtggctcaaaagatgtcaccaaggacctagtttctctctgtttagtcactgttttctttggtattggctttatccttaggctccatatggtagcacctggaagcttgagaatctccccttttaacagaaaaaaaaagttgctataattctaggtctcacattttcctatgtgccacacagaggacagataatatctcctctggtagctctcgatgaagaaaagcctctcttttccagaagagccagtatctcctcatatcacaatggctctgtggccaaggggatgggataaactgattgacacaagccaacagggtccactcatgaagatggtggtggtg

SEQ ID NO: 1576 - DNA, 348 bp, Artificial Sequence
  Description of Artificial sequences:primer
  misc_feature (1)..(348): 5' terminal sequence from clone image:813755. similar to zinc finger protein 7 (zinc finger protein kox4) (zinc finger protein hf.16).
cttccccttctctctgggaacagttacccgggtattctttgggaagctatcctttctcagctatgtggtttggcaccaccaccatcttcatgagtggaccctgtttggcttgtgtcaatcagtttatcccatccccttggccacagagccattgtgatatgaggagatactggctcttctggaaaagagaggcttttcttcatcgagagctaccagaggagatattatctgtcctctgtgtggcacataggaaaatgtgagacctagaattatagcgactttttttttctgttaaaaggggagattctcaagcttccaggtgctaccatatggagcctaaggataaag

SEQ ID NO: 1577 - DNA, 444 bp, Artificial Sequence
  Description of Artificial sequences:primer
  misc_feature (1)..(444): 3' terminal sequence from clone image:823859. gap junction protein, beta 2, 26kda (connexin 26)(GJB2) gene.
  misc_feature (440)..(440): n is a, c, g, or t
attatagagattatattttaatgttttaaatgtatttgatacattacaaaattattttagttacaagcatatcattaaagctattctttattattacaaaatgcttttacaatgctattcttgacaacaggaaaatacttaccctcactgaagtatgtggagtaccattttttggaaaccatgtcaagcataatggcaatattcaggttcaatcttcctatagatctgctcaatatttatctaaaccttagcttctattcttttcacatgttattagttatattttcacttaaaaaattggaggctgaaggggtaagcaaacaaacttttgaagtagacaaagctcatctttaatcaacagaatttagagtccagtctttccaaatctgttttaacgacagaaacttctccctccctgccccattttgtcctcccattanatgg

SEQ ID NO: 1578 - DNA, 561 bp, Artificial Sequence
  Description of Artificial sequences:primer
  misc_feature (1)..(561): 5' terminal sequence from clone image:823859. gap junction protein, beta 2, 26kda (connexin 26)(GJB2) gene.
  misc_feature (529)..(529): n is a, c, g, or t
tgaggacaagagaaaaaagccaggttccacagaggacacagagaaggtttgggtgtcctcctggggttctttttgccaactttccccacgttaaaggtgaacattggttctttcatttgctttggaagttttaatctctaacagtggacaaagttaccagtgccttaaactctgttacactttttggaagtgaaaactttgtagtatgataggttattttgatgtaaagatgttctggataccattatatgttccccctgtttcagaggctcagattgtaatatgtaaatggtatgtcattcgctactatgatttaatttgaaatatggtcttttggttatgaatactttgcagcacagctgagaggctgtctgttgtattcattgtggtcatagcacctaacaacattgtagcctcaatcgagtgagacagactagaagttcctagtgatggcttatgatagcaaatggcctcatgtcagaatattagatgtaattttgtgtataaatacagactggatgtacaccanctactacctgtaatgacaggcctgtccacaca

SEQ ID NO: 1579 - DNA, 2311 bp, Artificial Sequence
  Description of Artificial sequences:primer
  misc_feature (1)..(2311): gap junction protein, beta 2, 26kda (connexin 26)(GJB2) gene.
gatttaatcctatgacaaactaagttggttctgtcttcacctgttttggtgaggttgtgtaagagttggtgtttgctcaggaagagatttaagcatgcttgcttacccagactcagagaagtctccctgttctgtcctagctatgttcctgtgttgtgtgcattcgtcttttccagagcaaaccgcccagagtagaagatggattggggcacgctgcagacgatcctggggggtgtgaacaaacactccaccagcattggaaagatctggctcaccgtcctcttcatttttcgcattatgatcctcgttgtggctgcaaaggaggtgtggggagatgagcaggccgactttgtctgcaacaccctgcagccaggctgcaagaacgtgtgctacgatcactacttccccatctcccacatccggctatgggccctgcagctgatcttcgtgtccagcccagcgctcctagtggccatgcacgtggcctaccggagacatgagaagaagaggaagttcatcaagggggagataaagagtgaatttaaggacatcgaggagatcaaaacccagaaggtccgcatcgaaggctccctgtggtggacctacacaagcagcatcttcttccgggtcatcttcgaagccgccttcatgtacgtcttctatgtcatgtacgacggcttctccatgcagcggctggtgaagtgcaacgcctggccttgtcccaacactgtggactgctttgtgtcccggcccacggagaagactgtcttcacagtgttcatgattgcagtgtctggaatttgcatcctgctgaatgtcactgaattgtgttatttgctaattagatattgttctgggaagtcaaaaaagccagtttaacgcattgcccagttgttagattaagaaatagacagcatgagagggatgaggcaacccgtgctcagctgtcaaggctcagtcgccagcatttcccaacacaaagattctgaccttaaatgcaaccatttgaaacccctgtaggcctcaggtgaaactccagatgccacaatgagctctgctcccctaaagcctcaaaacaaaggcctaattctatgcctgtcttaattttctttcacttaagttagttccactgagaccccaggctgttaggggttattggtgtaaggtactttcatattttaaacagaggatatcggcatttgtttctttctctgaggacaagagaaaaaagccaggttccacagaggacacagagaaggtttgggtgtcctcctggggttctttttgccaactttccccacgttaaaggtgaacattggttctttcatttgctttggaagttttaatctctaacagtggacaaagttaccagtgccttaaactctgttacactttttggaagtgaaaactttgtagtatgataggttattttgatgtaaagatgttctggataccattatatgttccccctgtttcagaggctcagattgtaatatgtaaatggtatgtcattcgctactatgatttaatttgaaatatggtcttttggttatgaatactttgcagcacagctgagagaggctgtctgttgtattcattgtggtcatagcacctaacaacattgtagcctcaatcgagtgagacagactagaagttcctagttggcttatgatagcaaatggcctcatgtcaaatattagatgtaattttgtgtaagaaatacagactggatgtaccaccaactactacctgtaatgacaggcctgtccaacacatctcccttttccatgctgtggtagccagcatcggaaagaacgctgatttaaagaggtgagcttgggaattttattgacacagtaccatttaatggggagacaaaaatgggggccaggggagggagaagtttctgtcgttaaaaacgagtttggaaagactggactctaaattctgttgattaaagatgagctttgtctaccttcaaaagtttgtttggcttacccccttcagcctccaattttttaagtgaaaatataactaataacatgtgaaaagaatagaagctaaggtttagataaatattgagcagatctataggaagattgaacctgaatattgccattatgcttgacatggtttccaaaaaatggtactccacatacttcagtgagggtaagtattttcctgttgtcaagaatagcattgtaaaagcattttgtaataataaagaatagctttaatgatatgcttgtaactaaaataattttgtaatgtatcaaatacatttaaaacattaaaatataatctctataat

SEQ ID NO: 1580 - DNA, 302 bp, Artificial Sequence
  Description of Artificial sequences:primer
  misc_feature (1)..(302): 3' terminal sequence from clone image:840486. von willebrand factor(VWF) gene.
gcaagataagagctcagcctttattgtgggctcagaagggcacaagagcagaacatgcagaggactggcagcactctggcctggccatcagcaagggcaggcagcagcaggcacccatgcagctgcagcagcctcacttgctgcacttcctgggggagcatttgcactccatggcattgagaacctcatggtacacaacagagccattggtgcagtgcagggccacctgcatgggctccgtccgtgtcggagagcagcaggagcactggtcctgcacatcgttgatgtcaatggagtacatg

SEQ ID NO: 1581 - DNA, 322 bp, Artificial Sequence
  Description of Artificial sequences:primer
  misc_feature (1)..(322): 5' terminal sequence from clone image:840486. von willebrand factor(VWF) gene.
gcaaatgtgccagcaaagccaatgtactccattgacatcaacgatgtgcaggaccagtgctcctgctgctctccgacacggacggagcccatgcaggtggccctgcactgcaccaatggctctgttgtgtaccatgaggttctcaatgccatggagtgcaaatgctcccccaggaagtgcagcaagtgaggctgctgcagctgcatgggtgcctgctgctgcctgccttggctgatggcaggccagagtgctgccagtcctctgcatgttctgctcttgtgcccttctgagcccacaataaaggctgagctcttatcttgca

SEQ ID NO: 1582 - DNA, 8923 bp, Artificial Sequence
  Description of Artificial sequences:primer
  misc_feature (1)..(8923): von willebrand factor(VWF) gene.
agctcacagctattgtggtgggaaagggagggtggttggtggatgtcacagcttgggctttatctcccccagcagtggggactccacagcccctgggctacataacagcaagacagtccggagctgtagcagacctgattgagcctttgcagcagctgagagcatggcctagggtgggcggcaccattgtccagcagctgagtttcccagggaccttggagatagccgcagccctcatttgcaggggaaggcaccattgtccagcagctgagtttcccagggaccttggagatagccgcagccctcatttatgattcctgccagatttgccggggtgctgcttgctctggccctcattttgccagggaccctttgtgcagaaggaactcgcggcaggtcatccacggcccgatgcagccttttcggaagtgacttcgtcaacacctttgatgggagcatgtacagctttgcgggatactgcagttacctcctggcagggggctgccagaaacgctccttctcgattattggggacttccagaatggcaagagagtgagcctctccgtgtatcttggggaattttttgacatccatttgtttgtcaatggtaccgtgacacagggggaccaaagagtctccatgccctatgcctccaaagggctgtatctagaaactgaggctgggtactacaagctgtccggtgaggcctatggctttgtggccaggatcgatggcagcggcaactttcaagtcctgctgtcagacagatacttcaacaagacctgcgggctgtgtggcaactttaacatctttgctgaagatgactttatgacccaagaagggaccttgacctcggacccttatgactttgccaactcatgggctctgagcagtggagaacagtggtgtgaacgggcatctcctcccagcagctcatgcaacatctcctctggggaaatgcagaagggcctgtgggagcagtgccagcttctgaagagcacctcggtgtttgcccgctgccaccctctggtggaccccgagccttttgtggccctgtgtgagaagactttgtgtgagtgtgctggggggctggagtgcgcctgccctgccctcctggagtacgcccggacctgtgcccaggagggaatggtgctgtacggctggaccgaccacagcgcgtgcagcccagtgtgccctgctggtatggagtataggcagtgtgtgtccccttgcgccaggacctgccagagcctgcacatcaatgaaatgtgtcaggagcgatgcgtggatggctgcagctgccctgagggacagctcctggatgaaggcctctgcgtggagagcaccgagtgtccctgcgtgcattccggaaagcgctaccctcccggcacctccctctctcgagactgcaacacctgcatttgccgaaacagccagtggatctgcagcaatgaagaatgtccaggggagtgccttgtcactggtcaatcccacttcaagagctttgacaacagatacttcaccttcagtgggatctgccagtacctgctggcccgggattgccaggaccactccttctccattgtcattgagactgtccagtgtgctgatgaccgcgacgctgtgtgcacccgctccgtcaccgtccggctgcctggcctgcacaacagccttgtgaaactgaagcatggggcaggagttgccatggatggccaggacatccagctccccctcctgaaaggtgacctccgcatccagcatacagtgacggcctccgtgcgcctcagctacggggaggacctgcagatggactgggatggccgcgggaggctgctggtgaagctgtcccccgtctacgccgggaagacctgcggcctgtgtgggaattacaatggcaaccagggcgacgacttccttaccccctctgggctggcagagccccgggtggaggacttcgggaacgcctggaagctgcacggggactgccaggacctgcagaagcagcacagcgatccctgcgccctcaacccgcgcatgaccaggttctccgaggaggcgtgcgcggtcctgacgtcccccacattcgaggcctgccatcgtgccgtcagcccgctgccctacctgcggaactgccgctacgacgtgtgctcctgctcggacggccgcgagtgcctgtgcggcgccctggccagctatgccgcggcctgcgcggggagaggcgtgcgcgtcgcgtggcgcgagccaggccgctgtgagctgaactgcccgaaaggccaggtgtacctgcagtgcgggaccccctgcaacctgacctgccgctctctctcttacccggatgaggaatgcaatgaggcctgcctggagggctgcttctgccccccagggctctacatggatgagaggggggactgcgtgcccaaggcccagtgcccctgttactatgacggtgagatcttccagccagaagacatcttctcagaccatcacaccatgtgctactgtgaggatggcttcatgcactgtaccatgagtggagtccccggaagcttgctgcctgacgctgtcctcagcagtcccctgtctcatcgcagcaaaaggagcctatcctgtcggccccccatggtcaagctggtgtgtcccgctgacaacctgcgggctgaagggctcgagtgtaccaaaacgtgccagaactatgacctggagtgcatgagcatgggctgtgtctctggctgcctctgccccccgggcatggtccggcatgagaacagatgtgtggccctggaaaggtgtccctgcttccatcagggcaaggagtatgcccctggagaaacagtgaagattggctgcaacacttgtgtctgtcgggaccggaagtggaactgcacagaccatgtgtgtgatgccacgtgctccacgatcggcatggcccactacctcaccttcgacgggctcaaatacctgttccccggggagtgccagtacgttctggtgcaggattactgcggcagtaaccctgggacctttcggatcctagtggggaataagggatgcagccacccctcagtgaaatgcaagaaacgggtcaccatcctggtggagggaggagagattgagctgtttgacggggaggtgaatgtgaagaggcccatgaaggatgagactcactttgaggtggtggagtctggccggtacatcattctgctgctgggcaaagccctctccgtggtctgggaccgccacctgagcatctccgtggtcctgaagcagacataccaggagaaagtgtgtggcctgtgtgggaattttgatggcatccagaacaatgacctcaccagcagcaacctccaagtggaggaagaccctgtggactttgggaactcctggaaagtgagctcgcagtgtgctgacaccagaaaagtgcctctggactcatcccctgccacctgccataacaacatcatgaagcagacgatggtggattcctcctgtagaatccttaccagtgacgtcttccaggactgcaacaagctggtggaccccgagccatatctggatgtctgcatttacgacacctgctcctgtgagtccattggggactgcgcctgcttctgcgacaccattgctgcctatgcccacgtgtgtgcccagcatggcaaggtggtgacctggaggacggccacattgtgcccccagagctgcgaggagaggaatctccgggagaacgggtatgagtgtgagtggcgctataacagctgtgcacctgcctgtcaagtcacgtgtcagcaccctgagccactggcctgccctgtgcagtgtgtggagggctgccatgcccactgccctccagggaaaatcctggatgagcttttgcagacctgcgttgaccctgaagactgtccagtgtgtgaggtggctggccggcgttttgcctcaggaaagaaagtcaccttgaatcccagtgaccctgagcactgccagatttgccactgtgatgttgtcaacctcacctgtgaagcctgccaggagccgggaggcctggtggtgcctcccacagatgccccggtgagccccaccactctgtatgtggaggacatctcggaaccgccgttgcacgatttctactgcagcaggctactggacctggtcttcctgctggatggctcctccaggctgtccgaggctgagtttgaagtgctgaaggcctttgtggtggacatgatggagcggctgcgcatctcccagaagtgggtccgcgtggccgtggtggagtaccacgacggctcccacgcctacatcgggctcaaggaccggaagcgaccgtcagagctgcggcgcattgccagccaggtgaagtatgcgggcagccaggtggcctccaccagcgaggtcttgaaatacacactgttccaaatcttcagcaagatcgaccgccctgaagcctcccgcatcgccctgctcctgatggccagccaggagccccaacggatgtcccggaactttgtccgctacgtccagggcctgaagaagaagaaggtcattgtgatcccggtgggcattgggccccatgccaacctcaagcagatccgcctcatcgagaagcaggcccctgagaacaaggccttcgtgctgagcagtgtggatgagctggagcagcaaagggacgagatcgttagctacctctgtgaccttgcccctgaagcccctcctcctactctgcccccccacatggcacaagtcactgtgggcccggggctcttgggggtttcgaccctggggcccaagaggaactccatggttctggatgtggcgttcgtcctggaaggatcggacaaaattggtgaagccgacttcaacaggagcaaggagttcatggaggaggtgattcagcggatggatgtgggccaggacagcatccacgtcacggtgctgcagtactcctacatggtgaccgtggagtaccccttcagcgaggcacagtccaaaggggacatcctgcagcgggtgcgagagatccgctaccagggcggcaacaggaccaacactgggctggccctgcggtacctctctgaccacagcttcttggtcagccagggtgaccgggagcaggcgcccaacctggtctacatggtcaccggaaatcctgcctctgatgagatcaagaggctgcctggagacatccaggtggtgcccattggagtgggccctaatgccaacgtgcaggagctggagaggattggctggcccaatgcccctatcctcatccaggactttgagacgctcccccgagaggctcctgacctggtgctgcagaggtgctgctccggagaggggctgcagatccccaccctctcccctgcacctgactgcagccagcccctggacgtgatccttctcctggatggctcctccagtttcccagcttcttattttgatgaaatgaagagtttcgccaaggctttcatttcaaaagccaatatagggcctcgtctcactcaggtgtcagtgctgcagtatggaagcatcaccaccattgacgtgccatggaacgtggtcccggagaaagcccatttgctgagccttgtggacgtcatgcagcgggagggaggccccagccaaatcggggatgccttgggctttgctgtgcgatacttgacttcagaaatgcatggtgccaggccgggagcctcaaaggcggtggtcatcctggtcacggacgtctctgtggattcagtggatgcagcagctgatgccgccaggtccaacagagtgacagtgttccctattggaattggagatcgctacgatgcagcccagctacggatcttggcaggcccagcaggcgactccaacgtggtgaagctccagcgaatcgaagacctccctaccatggtcaccttgggcaattccttcctccacaaactgtgctctggatttgttaggatttgcatggatgaggatgggaatgagaagaggcccggggacgtctggaccttgccagaccagtgccacaccgtgacttgccagccagatggccagaccttgctgaagagtcatcgggtcaactgtgaccgggggctgaggccttcgtgccctaacagccagtcccctgttaaagtggaagagacctgtggctgccgctggacctgcccctgcgtgtgcacaggcagctccactcggcacatcgtgacctttgatgggcagaatttcaagctgactggcagctgttcttatgtcctatttcaaaacaaggagcaggacctggaggtgattctccataatggtgcctgcagccctggagcaaggcagggctgcatgaaatccatcgaggtgaagcacagtgccctctccgtcgagctgcacagtgacatggaggtgacggtgaatgggagactggtctctgttccttacgtgggtgggaacatggaagtcaacgtttatggtgccatcatgcatgaggtcagattcaatcaccttggtcacatcttcacattcactccacaaaacaatgagttccaactgcagctcagccccaagacttttgcttcaaagacgtatggtctgtgtgggatctgtgatgagaacggagccaatgacttcatgctgagggatggcacagtcaccacagactggaaaacacttgttcaggaatggactgtgcagcggccagggcagacgtgccagcccatcctggaggagcagtgtcttgtccccgacagctcccactgccaggtcctcctcttaccactgtttgctgaatgccacaaggtcctggctccagccacattctatgccatctgccagcaggacagttgccaccaggagcaagtgtgtgaggtgatcgcctcttatgcccacctctgtcggaccaacggggtctgcgttgactggaggacacctgatttctgtgctatgtcatgcccaccatctctggtctacaaccactgtgagcatggctgtccccggcactgtgatggcaacgtgagctcctgtggggaccatccctccgaaggctgtttctgccctccagataaagtcatgttggaaggcagctgtgtccctgaagaggcctgcactcagtgcattggtgaggatggagtccagcaccagttcctggaagcctgggtcccggaccaccagccctgtcagatctgcacatgcctcagcgggcggaaggtcaactgcacaacgcagccctgccccacggccaaagctcccacgtgtggcctgtgtgaagtagcccgcctccgccagaatgcagaccagtgctgccccgagtatgagtgtgtgtgtgacccagtgagctgtgacctgcccccagtgcctcactgtgaacgtggcctccagcccacactgaccaaccctggcgagtgcagacccaacttcacctgcgcctgcaggaaggaggagtgcaaaagagtgtccccaccctcctgccccccgcaccgtttgcccacccttcggaagacccagtgctgtgatgagtatgagtgtgcctgcaactgtgtcaactccacagtgagctgtccccttgggtacttggcctcaaccgccaccaatgactgtggctgtaccacaaccacctgccttcccgacaaggtgtgtgtccaccgaagcaccatctaccctgtgggccagttctgggaggagggctgcgatgtgtgcacctgcaccgacatggaggatgccgtgatgggcctccgcgtggcccagtgctcccagaagccctgtgaggacagctgtcggtcgggcttcacttacgttctgcatgaaggcgagtgctgtggaaggtgcctgccatctgcctgtgaggtggtgactggctcaccgcggggggactcccagtcttcctggaagagtgtcggctcccagtgggcctccccggagaacccctgcctcatcaatgagtgtgtccgagtgaaggaggaggtctttatacaacaaaggaacgtctcctgcccccagctggaggtccctgtctgcccctcgggctttcagctgagctgtaagacctcagcgtgctgcccaagctgtcgctgtgagcgcatggaggcctgcatgctcaatggcactgtcattgggcccgggaagactgtgatgatcgatgtgtgcacgacctgccgctgcatggtgcaggtgggggtcatctctggattcaagctggagtgcaggaagaccacctgcaacccctgccccctgggttacaaggaagaaaataacacaggtgaatgttgtgggagatgtttgcctacggcttgcaccattcagctaagaggaggacagatcatgacactgaagcgtgatgagacgctccaggatggctgtgatactcacttctgcaaggtcaatgagagaggagagtacttctgggagaagagggtcacaggctgcccaccctttgatgaacacaagtgtctggctgagggaggtaaaattatgaaaattccaggcacctgctgtgacacatgtgaggagcctgagtgcaacgacatcactgccaggctgcagtatgtcaaggtgggaagctgtaagtctgaagtagaggtggatatccactactgccagggcaaatgtgccagcaaagccatgtactccattgacatcaacgatgtgcaggaccagtgctcctgctgctctccgacacggacggagcccatgcaggtggccctgcactgcaccaatggctctgttgtgtaccatgaggttctcaatgccatggagtgcaaatgctcccccaggaagtgcagcaagtgaggctgctgcagctgcatgggtgcctgctgctgcctgccttggcctgatggccaggccagagtgctgccagtcctctgcatgttctgctcttgtgcccttctgagcccacaataaaggctgagctcttatcttgctgcatgttctgctcttgtgcccttctgagcccacaat

SEQ ID NO: 1583 - DNA, 459 bp, Artificial Sequence
  Description of Artificial sequences:primer
  misc_feature (1)..(459): 3' terminal sequence from clone image:845363. non-metastatic cells 1, protein (nm23a) expressed in(NME1) gene.
agcattttaatcagatggtcggggatggtaacactgtacagggagaactcacagctccaagagcttccctccaaattatgatgaagttcctgtaaataactagatttcctacagcctggtcctctgcccatgggaaggaggggaaatggatgtgaaaagcaatgtggtctgccctcctgtcattcatagatccagttctgagcacagctcgtgtaatctaccagttcctcagggtgaaaccacaagccgatctccttctctgcactctccacagaatcactgccatgtataatgttcctgccaacttgtatgcagaagtctccacggatggtcccaggcttggagtctgcagggttggtctccccgagcatgactcggcccgtcttcaccacattcagcccctcccagaccatggcaactaccggccctgagtgcatgtatttcaccaggccggcaaag

SEQ ID NO: 1584 - DNA, 433 bp, Artificial Sequence
  Description of Artificial sequences:primer
  misc_feature (1)..(433): 3' terminal sequence from clone image:856961. eukaryotic translation initiation factor 3, subunit 6 48kda(EIF3S6) gene.
ctttatggttcttcagtagaagccagaatcttgagttgcccagttaggagcctctgacctgctattctgattaagtttcttctcaatattcatggccaacatctggcttctaaaggaaaggcttttggtcttttcaatcacttgctgatagggtgagactgcattgttacccataaccacatgacctaatttagaatcaatcttggcatccagtcttgcatttctaatcaaatttacaatccacctttcagcctcctcctggagtcatgttcaatttatctgccaacatgttaatgctgatacactggtggatgcgacagaaagtctcaaatatgaagagacgggcattttcaatgaaatcctcaagacaagccaccaagaagaagtcattcacaagcactgattcacattccctcagctttttctgagcccc

SEQ ID NO: 1585 - DNA, 1510 bp, Artificial Sequence
  Description of Artificial sequences:primer
  misc_feature (1)..(1510): eukaryotic translation initiation factor 3, subunit 6 48kda(EIF3S6) gene.
ggactcccttttctttggcaagatggcggagtacgacttgactactcgcatcgcgcactttttggatcggcatctagtctttccgcttcttgaatttctctctgtaaaggagatatataatgaaaaggaattattacaaggtaaattggaccttcttagtgataccaacatggtagactttgctatggatgtatacaaaaacctttattctgatgatattcctcatgctttgagagagaaaagaaccacagtggttgcacaactgaaacagcttcaggcagaaacagaaccaattgtgaagatgtttgaagatccagaaactacaaggcaaatgcagtcaaccagggatggtaggatgctctttgactacctggcggacaagcatggttttaggcaggaatatttagatacactctacagatatgcaaaattccagtacgaatgtgggaattactcaggagcagcagaatatctttatttttttagagtgctggttccagcaacagatagaaatgctttaagttcactctggggaaagctggcctctgaaatcttaatgcagaattgggatgcagccatggaagaccttacacggttaaaagagaccatagataataattctgtgagttctccacttcagtctcttcagcagagaacatggctcattcactggtctctgtttgttttcttcaatcaccccaaaggtcgcgataatattattgacctcttcctttatcagccacaatatcttaatgcaattcagacaatgtgtccacacattcttcgctatttgactacagcagtcataacaaacaaggatgttcgaaaacgtcggcaggttctaaaagatctagttaaagttattcaacaggagtcttacacatataaagacccaattacagaatttgttgaatgtttatatgttaactttgactttgatggggctcagaaaaagctgagggaatgtgaatcagtgcttgtgaatgacttcttcttggtggcttgtcttgaggatttcattgaaaatgcccgtctcttcatatttgagactttctgtcgcatccaccagtgtatcagcattaacatgttggcagataaattgaacatgactccagaagaagctgaaaggtggattgtaaatttgattagaaatgcaagactggatgccaagattgattctaaattaggtcatgtggttatgggtaacaatgcagtctcaccctatcagcaagtgattgaaaagaccaaaagcctttcctttagaagccagatgttggccatgaatattgagaagaaacttaatcagaatagcaggtcagaggctcctaactgggcaactcaagattctggcttctactgaagaaccataaagaaaagatgaaaaaaaaaactatcaaagaaagatgaaataataaaactattatataaagggtgacttacattttggaaacaacatattacgtataaattttgaagaattggaataaaattgattcattttaaaaaaaaa

SEQ ID NO: 1586 - DNA, 285 bp, Artificial Sequence
  Description of Artificial sequences:primer
  misc_feature (1)..(285): 3' terminal sequence from clone image:86078.
  misc_feature (64)..(64): n is a, c, g, or t
  misc_feature (82)..(82): n is a, c, g, or t
  misc_feature (180)..(180): n is a, c, g, or t
  misc_feature (192)..(192): n is a, c, g, or t
  misc_feature (197)..(197): n is a, c, g, or t
  misc_feature (236)..(236): n is a, c, g, or t
  misc_feature (284)..(284): n is a, c, g, or t
ttttttttttttttttttccactttggaaacgtttattctgagcaccgggaaggggggcggcgncgggccctcacttgggtnttgagcttcttagtgtactcctcgagagcgctcaggaagctgaccttgaagctctccagcacgggcagcaggcttggcggaggtcctcgagcgcgggnttggcttctcgntgagntgctcagatgctcggtggccttgggtggtactcggccantctggcgccgcgttctccttgagagcctcaagggcgcggccaagcttng

SEQ ID NO: 1587 - DNA, 427 bp, Artificial Sequence
  Description of Artificial sequences:primer
  misc_feature (1)..(427): 3' terminal sequence from clone image:869440.
gtgtttttggtgtggtgtgattatgtgattgttaatgatttattcactatatcttacattaagacctatggtgtccttttaacctaatgtgtcctttgaagtcaagcaaaaccgtaagaatggttaaaaaattaacagctttggttcaattgccttataaacacataatataggtattactgatcgaaggaaagttcagtgaagatgctggtagtttacagcactccggagaattaaaacaatgagatgtaaaggtaacagctctaaaaattcagacatttgccttattaagctcttttctacaagagacttcattacattgaaaaatgaaacctggcacccatcctaggagaattatctgtgcagaagttctgatttacagatttgtgatcttagggaacagtgtgcacacccagggtgaaatttc

SEQ ID NO: 1588 - DNA, 469 bp, Artificial Sequence
  Description of Artificial sequences:primer
  misc_feature (1)..(469): 3' terminal sequence from clone image:878681. ribosomal protein l30(RPL30) gene.
tttttttgtttttaaaacaagcaaattttattaaaggaaaattttgcaggtttaaggtttgcaggtgaaattttgtaggtgaaaaggtttacttttcaccagtctgttctggcatgcttctaatgatgtcagagtcacctggatcaatgatagccagtgtgcacactctgtagtattttccgcatgctgtgcccagttcaatattattgccactgtagtgatggacaccagttttagccaacatagcatagtactctatttcagatttcctcaaagctgggcagttgttagcgagaatgaccaatttcgctttgccttgtctgatcatcttcagagtctgcttgtaccccaggacgtacttcccacttttcataacgagttggagcctagagttgatcgactccagcgactttttacgtctttctttgcgggcccaatcttcctgccttaggagcgggacggcccccaa

SEQ ID NO: 1589 - DNA, 524 bp, Artificial Sequence
  Description of Artificial sequences:primer
  misc_feature (1)..(524): ribosomal protein l30(RPL30) gene.
cctttctcgttccccggccatcttagcggctgctgttggttgggggccgtcccgctcctaaggcaggaagatggtggccgcaaagaagacgaaaaagtcgctggagtcgatcaactctaggctccaactcgttatgaaaagtgggaagtacgtcctggggtacaagcagactctgaagatgatcagacaaggcaaagcgaaattggtcattctcgctaacaactgcccagctttgaggaaatctgaaatagagtactatgctatgttggctaaaactggtgtccatcactacagtggcaataatattgaactgggcacagcatgcggaaaatactacagagtgtgcacactggctatcattgatccaggtgactctgacatcattagaagcatgccagaacagactggtgaaaagtaaaccttttcacctacaaaatttcacctgcaaaccttaaacctgcaaaattttcctttaataaaatttgcttgttttaaaaacattgtaaaaaaaaaaaaaaaaaaaa

SEQ ID NO: 1590 - DNA, 612 bp, Artificial Sequence
  Description of Artificial sequences:primer
  misc_feature (1)..(612): 3' terminal sequence from clone image:878798. beta-2-microglobulin(B2M) gene.
tttcaagttttatgatttatttaacttgtggaacaaaaataaaccagattaaccacaaccatgccttactttatcaaatgtataagaagtaaatatgaatcttatatgacaaaatgtttcattcattataacaaatttccaataatcctgtcaattatatttctaaattttcccccaaattctaagcagagtatgtaaattggaagttaacttatgcacgcttaactatcttaacaagctttgagtgcaagagattgaagagttcaaatctgaccaagatgttgatgttggataagagaattctctgctccccacctctaagttgccagccctcctagagctacctgtggagcaacctgctcagatacatcaaacatggagacagcactcaaagtagaattataaagaagatcatgtccatgttaacattattataaccccacattttgtgcctaaagtgtaagtggtatagcctatccatattaaaaaggccagccagcggaatttgggattcatcgcatccacatgcgggagctttcagactcccagagggggcgctacaaggctcggtcccacctacaaatctggcgtggacaagtcccgggttaacgg

SEQ ID NO: 1591 - DNA, 417 bp, Artificial Sequence
  Description of Artificial sequences:primer
  misc_feature (1)..(417): 3' terminal sequence from clone image:884365. high-mobility group box 2(HMGB2) gene.
aatatacataattttattacaaaattttttttaaaaaaacgaaatgcaacatcctaaaaaacccaaaatttactattgatactaattcctacaagtttgctgtgctaccatacacaagaaattaaaaaaaccattaaatatttaggaacattcaacatcagaagctgtaaaatctaactgtatgagtagcccatcaaaaagctacaacctgcattttttaaaagtattttctctacagagaatcttatcagctatacaaaaatctgtacagtttttatactgaagctagtattgagctgcacttgaattcacattcttagcaaaataattgcctgagcacacacacacattccacacgcatcattaaaggatagccatttattcttcatcttcatcctcttcctcctcatcttcatc

SEQ ID NO: 1592 - DNA, 467 bp, Artificial Sequence
  Description of Artificial sequences:primer
  misc_feature (1)..(467): 3' terminal sequence from clone image:884644. laminin receptor 1 (ribosomal protein sa, 67kda)(LAMR1) gene.
acttttagaaactgatgtttattttccatcaaccatttttccatgctgcttaagagcctatgcaagaacagcttaagaccagtcagtggttgctcctacccattcagtggcctgagcagtgggagctgcagaccagtcttccgtggcaggctgagcgctccagtcttcagtagggaattgctgaataggcacagagggcacctgtacaccttcagaccagtctgcaacctcaggctgagtagcagtgaactcaggagcgggacgagtccattcaccctgaaattcctccttggtcactgccttctcagcagcagcctgctcttctttttcaatctcttcaggatctctgtagaagtacagatcaggcatgacctcccatgggtgttcacgggaaatggtgccacgctgcgcagaacttcccgagccagcatccaccacatcaaacccactgagtgagatcccttgtt

SEQ ID NO: 1593 - DNA, 224 bp, Artificial Sequence
  Description of Artificial sequences:primer
  misc_feature (1)..(224): 3' terminal sequence from clone image:897956. preferentially expressed antigen in melanoma(PRAME) gene.
ttcacattgcttctctttattttcaacagtttctttacaacagtctacacagggattaactcctacatgtacttcccaagccagaatctccctttagaaattcagattctatttctaactctataagatgtatctccccaaagatcacattaactcctcaagtcaacatctgcctatccccaacttcccctttttttcctcactgaacatttgtctgaatgttt

SEQ ID NO: 1594 - DNA, 2148 bp, Artificial Sequence
  Description of Artificial sequences:primer
  misc_feature (1)..(2148): preferentially expressed antigen in melanoma(PRAME) gene.
gcttcagggtacagctcccccgcagccagaagccgggcctgcagcgcctcagcaccgctccgggacaccccacccgcttcccaggcgtgacctgtcaacagcaacttcgcggtgtggtgaactctctgaggaaaaaccattttgattattactctcagacgtgcgtggcaacaagtgactgagacctagaaatccaagcgttggaggtcctgaggccagcctaagtcgcttcaaaatggaacgaaggcgtttgtggggttccattcagagccgatacatcagcatgagtgtgtggacaagcccacggagacttgtggagctggcagggcagagcctgctgaaggatgaggccctggccattgccgccctggagttgctgcccagggagctcttcccgccactcttcatggcagcctttgacgggagacacagccagaccctgaaggcaatggtgcaggcctggcccttcacctgcctccctctgggagtgctgatgaagggacaacatcttcacctggagaccttcaaagctgtgcttgatggacttgatgtgctccttgcccaggaggttcgccccaggaggtggaaacttcaagtgctggatttacggaagaactctcatcaggacttctggactgtatggtctggaaacagggccagtctgtactcatttccagagccagaagcagctcagcccatgacaaagaagcgaaaagtagatggtttgagcacagaggcagagcagcccttcattccagtagaggtgctcgtagacctgttcctcaaggaaggtgcctgtgatgaattgttctcctacctcattgagaaagtgaagcgaaagaaaaatgtactacgcctgtgctgtaagaagctgaagatttttgcaatgcccatgcaggatatcaagatgatcctgaaaatggtgcagctggactctattgaagatttggaagtgacttgtacctggaagctacccaccttggcgaaattttctccttacctgggccagatgattaatctgcgtagactcctcctctcccacatccatgcatcttcctacatttccccggagaaggaagagcagtatatcgcccagttcacctctcagttcctcagtctgcagtgcctgcaggctctctatgtggactctttatttttccttagaggccgcctggatcagttgctcaggcacgtgatgaaccccttggaaaccctctcaataactaactgccggctttcggaaggggatgtgatgcatctgtcccagagtcccagcgtcagtcagctaagtgtcctgagtctaagtggggtcatgctgaccgatgtaagtcccgagcccctccaagctctgctggagagagcctctgccaccctccaggacctggtctttgatgagtgtgggatcacggatgatcagctccttgccctcctgccttccctgagccactgctcccagcttacaaccttaagcttctacgggaattccatctccatatctgccttgcagagtctcctgcagcacctcatcgggctgagcaatctgacccacgtgctgtatcctgtccccctggagagttatgaggacatccatggtaccctccacctggagaggcttgcctatctgcatgccaggctcagggagttgctgtgtgagttggggcggcccagcatggtctggcttagtgccaacccctgtcctcactgtggggacagaaccttctatgacccggagcccatcctgtgcccctgtttcatgcctaactagctgggtgcacatatcaaatgcttcattctgcatacttggacactaaagccaggatgtgcatgcatcttgaagcaacaaagcagccacagtttcagacaaatgttcagtgtgagtgaggaaaacatgttcagtgaggaaaaaacattcagacaaatgttcagtgaggaaaaaaaggggaagttggggataggcagatgttgacttgaggagttaatgtgatctttggggagatacatcttatagagttagaaatagaatctgaatttctaaagggagattctggcttgggaagtacatgtaggagttaatccctgtgtagactgttgtaaagaaactgttgaaaataaagagaagcaatgtgaagcaaaaaaaaaaaaaaaaaa

SEQ ID NO: 1595 - DNA, 513 bp, Artificial Sequence
  Description of Artificial sequences:primer
  misc_feature (1)..(513): 3' terminal sequence from clone image:951066. non-metastatic cells 2, protein (nm23b) expressed in(NME2) gene.
  misc_feature (367)..(367): n is a, c, g, or t
tccggcttccaaaagctttattggcaaatatgctctataaaagaatgatcaatcctgttgcctctaagtcaatggaatgaagagctgtgtccagggaccaccacgccgtgctgaaggagactgctgttgtgtccacctcttattcatagacccagtcatgagcacaagacttgtagtcaaccagttcttcaggcttaaaccataggctgatttctttttcagcactttttactgaatcactgccatgaatgatgttcctgccaacctgaatgcagaagtccccacgaatggtgcctggctttgaatctgctggattggtctcccaagcatcactcggcctgtcttcaccacgttcagccctcgcagnacatggccacaaccggccctgagttcatgtacttcaccagacccagggaagaaatggtcgttctttcaggtcaatgtagtgctgcttcaggtgttcttcagaggcccggagaaacttcaatggcacgagggggaaatccttctgct

SEQ ID NO: 1596 - DNA, 670 bp, Artificial Sequence
  Description of Artificial sequences:primer
  misc_feature (1)..(670): non-metastatic cells 2, protein (nm23b) expressed in(NME2) gene.
cggccacgaggcggaatcccttctgctctcccagcgcagcgccgccgcccggcccctccagcttcccggaccatggccaacctggagcgcaccttcatcgccatcaagccggacggcgtgcagcgcggcctggtgggcgagatcatcaagcgcttcgagcagaagggattccgcctcgtggccatgaagttcctccgggcctctgaagaacacctgaagcagcactacattgacctgaaagaccgaccattcttccctgggctggtgaagtacatgaactcagggccggttgtggccatggtctgggaggggctgaacgtggtgaagacaggccgagtgatgcttggggagaccaatccagcagattcaaagccaggcaccattcgtggggacttctgcattcaggttggcaggaacatcattcatggcagtgattcagtaaaaagtgctgaaaaagaaatcagcctatggtttaagcctgaagaactggttgactacaagtcttgtgctcatgactgggtctatgaataagaggtggacacaacagcagtctccttcagcacggcgtggtgtgtccctggacacagctcttcattccattgacttagaggcaacaggattgatcattcttttatagagcatatttgccaataaagcttttggaagccgg
